(19) United States
(12) Patent Application Publication
(10) Pub. No.: US 2025/0333473 A1
(43) Pub. Date: Oct. 30, 2025

(54) CELLS LACKING B2M SURFACE EXPRESSION AND METHODS FOR ALLOGENEIC ADMINISTRATION OF SUCH CELLS

(71) Applicant: President and Fellows of Harvard College, Cambridge, MA (US)

(72) Inventors: Chad A. Cowan, Cambridge, MA (US); Leonardo M.R. Ferreira, Cambridge, MA (US); Torsten B. Meissner, Cambridge, MA (US); Jack L. Strominger, Cambridge, MA (US)

(21) Appl. No.: 18/949,619

(22) Filed: Nov. 15, 2024

Related U.S. Application Data
(62) Division of application No. 15/524,968, filed on May 5, 2017, now Pat. No. 12,180,263.
(60) Provisional application No. 62/076,424, filed on Nov. 6, 2014.

(51) Int. Cl. C07K 14/74; A61K 35/12; A61K 35/28; A61K 48/00; A61P 31/18; C12N 5/0789; C12N 9/22; C12N 15/11; C12N 15/113

(52) U.S. Cl. CPC C07K 14/70539; A61K 35/12; A61K 35/28; A61P 31/18; C12N 5/0647; C12N 9/22; C12N 15/11; C12N 15/1138; A61K 2035/124; A61K 48/0066; C12N 2310/10; C12N 2310/20; C12N 2510/00

(57) ABSTRACT

Disclosed herein are cells and populations of cells comprising a genome in which the B2M gene has been edited to eliminate surface expression of MHC Class I protein in the cells or population of cells, and methods for allogeneic administration of such cells to reduce the likelihood that the cells will trigger a host immune response when the cells are administered to a subject in need of such cells.

### CROSS-REFERENCE TO RELATED APPLICATIONS

[0001] This application is a divisional of U.S. application Ser. No. 15/524,968, filed on May 5, 2017, which is a national stage filing under 35 U.S.C. 371 of International Application No. PCT/US2015/059621, filed Nov. 6, 2015, which claims the benefit of U.S. Provisional Application No. 62/076,424, filed on Nov. 6, 2014, the contents of which are hereby incorporated by reference in its entirety. International Application PCT/US2015/059621 was published under PCT Article 21(2) in English.

### GOVERNMENT SUPPORT

[0002] This invention was made with government support under AI053330, DK097768 and HL100408 awarded by the National Institutes of Health. The government has certain rights in the invention.

### SEQUENCE LISTING

[0003] The Sequence Listing associated with this application is provided in. xml format in lieu of a paper copy and is hereby incorporated by reference into the specification. The name of the .xml file containing the Sequence Listing is HRVY-052-102.xml. The xml file is 3,439,955 bytes, was created on Feb. 14, 2025, and is being submitted electronically via Patent Center.

### BACKGROUND OF THE INVENTION

[0004] Genome editing applications have increased in frequency as a result of the efficacy and ease of use of recent tools, e.g., CRISPR and TALEN systems. However, genome editing in clinically relevant human somatic cells remains a challenge, for example, due to unwanted host immune responses to allogeneic transplantation of such cells. Accordingly, there exists a need for cells suitable for allogeneic transplantation that eliminate or reduce the likelihood of triggering unwanted recipient immune responses to allogeneic transplants of such cells.

### SUMMARY OF THE INVENTION

[0005] Work described herein demonstrates targeting of clinically relevant genes, e.g., B2M and CCR5, in primary human CD4+ T cells and CD34+ hematopoietic stem and progenitor cells (HSPCs) using genome editing tools, such as a CRISPR and/or TALEN system. In a CRISPR/Cas system the Cas protein may be, for example, Cas9 or Cpf1. Work described herein demonstrates efficient ablation of genes in HSPCs with minimal off-target mutagenesis, which has broad applicability for hematopoietic cell-based therapy. One particular aspect of work described herein is the creation of cells suitable for transplantation that eliminate or reduce the likelihood of triggering unwanted recipient immune responses to allogeneic transplants of such cells.

[0006] Accordingly, in some aspects, the invention provides a primary human cell or population of primary human cells comprising a genome in which the β2-microglobulin (B2M) gene on chromosome 15 has been edited to delete a contiguous stretch of genomic DNA comprising base pairs 5109 to 7331 (SEQ ID NO: 1; NCBI Reference Sequence: NG_012920.1), thereby eliminating surface expression of MHC Class I molecules in the cell or population of cells.

[0007] In some aspects, the invention provides a primary human cell or population of primary human cells comprising a genome in which the β2-microglobulin (B2M) gene on chromosome 15 has been edited to delete a contiguous stretch of genomic DNA, thereby eliminating surface expression of MHC Class I molecules in the cell or population of cells, wherein the contiguous stretch of genomic DNA has been deleted by contacting the cell or population of human cells with a Cas protein or a nucleic acid encoding the Cas protein and a pair of ribonucleic acids targeting SEQ ID NO: 16 and SEQ ID NO: 21.

[0008] In some embodiments, the cell or population of cells are selected from the group consisting of a stem cell, a pluripotent cell, a progenitor cells, a hematopoietic stem and/or progenitor cell, a CD34+ mobilized peripheral blood cell, a CD34+ cord blood cell, a CD34+ bone marrow cell, a CD34+CD38-Lineage-CD90+CD45RA− cell, and a CD34+ hematopoietic stem and/or progenitor cell; a CD4+ T cell, a hepatocyte, a somatic cell, and a non-transformed cell.

[0009] In some embodiments, the cell or cells is obtained from a subject suffering from, being treated for, diagnosed with, at risk of developing, or suspected of having, a disorder selected from the group consisting of a genetic disorder, an infection, and cancer. In some embodiments, the disorder comprises HIV or AIDs. In some embodiments, the cell or population of cells comprises a genome in which one or more additional genes have been edited to eliminate expression.

[0010] In some aspects, the invention provides a method for allogeneic administration of cells to a subject in need of such cells, the method comprising: (a) contacting a population of primary cells obtained from a first subject ex vivo with a Cas protein or a nucleic acid encoding a Cas protein and a pair of ribonucleic acids targeting SEQ ID NO: 16 and SEQ ID NO: 21, thereby editing the genome of at least 25% of the primary cells in the population to delete a contiguous stretch of genomic DNA comprising base pairs 5109 to 7331 (SEQ ID NO: 1) in the B2M gene on chromosome 15, wherein the genomically edited cells lack surface expression of MHC Class I protein; and (b) administering the genomically edited cells to a second subject in need of such cells.

[0011] In some embodiments, prior to the step of administering, the population of cells is sorted for genomically edited cells. In some embodiments, prior to the step of administering, the population of cells is expanded. In some embodiments, the population of primary cells are selected from the group consisting of a stem cell, a pluripotent cell, a progenitor cells, a hematopoietic stem and/or progenitor cells, a CD34+ cell, a CD34+ mobilized peripheral blood cell, a CD34+ cord blood cell, a CD34+ bone marrow cell, a CD34+CD38-Lineage-CD90+CD45RA− cell, a CD34+ hematopoietic stem and/or progenitor cell, a CD4+ T cell, a hepatocyte, a somatic cell, and a non-transformed cell. In some embodiments, the second subject is suffering from, being treated for, diagnosed with, at risk of developing, or suspected of having, a disorder selected from the group consisting of a genetic disorder, an infection, and cancer. In some embodiments, the disorder comprises HIV or AIDs. In some embodiments, the method includes, prior to the step of administering, editing the genome of the genomically modified cells to eliminate or reduce expression of one or more additional genes.

[0012] In some embodiments, the invention provides a composition comprising a chimeric nucleic acid, the chimeric nucleic acid comprising: (a) a nucleic acid sequence encoding a Cas protein; and at least two ribonucleic acids each targeting a different sequence selected from the group consisting of SEQ ID NO: 9, SEQ ID NO: 10, SEQ ID NO: 11, SEQ ID NO: 12, SEQ ID NO: 13, SEQ ID NO: 14, SEQ ID NO: 15, SEQ ID NO: 16, SEQ ID NO: 17, SEQ ID NO: 18, SEQ ID NO: 19, SEQ ID NO: 20, SEQ ID NO: 21, SEQ ID NO: 22, and SEQ ID NO: 23. In some embodiments, the at least two ribonucleic acids comprise a first ribonucleic acid targeting SEQ ID NO: 16, and a second ribonucleic acid targeting SEQ ID NO: 21.

[0013] In some embodiments, the composition comprising a nucleic acid sequence encoding a detectable marker. In some embodiments, the Cas protein comprises a Cas9 protein or a functional portion thereof. In some embodiments, the composition includes a promoter optimized for increased expression in human cells operably linked to the chimeric nucleic acid, wherein the promoter is selected from the group consisting of a Cytomegalovirus (CMV) early enhancer element and a chicken beta-actin promoter, a chicken beta-actin promoter, an elongation factor-1 alpha promoter, and a ubiquitin promoter. In some embodiments, the chimeric nucleic acid comprises at least one modified nucleotide selected from the group consisting of pseudouridine, 5-methylcytodine, 2-thio-uridine, 5-methyluridine-5′-triphosphate, 4-thiouridine-5′-triphosphate, 5,6-dihydrouridine-5′-triphosphate, and 5-azauridine-5′-triphosphate. In some embodiment, the nucleic acid encoding Cas protein comprises a messenger RNA (mRNA) encoding Cas9 protein. In some embodiments, the mRNA comprises at least one modified nucleotide selected from the group consisting of pseudouridine, 5-methylcytodine, 2-thio-uridine, 5-methyluridine-5′-triphosphate, 4-thiouridine-5′-triphosphate, 5,6-dihydrouridine-5′-triphosphate, and 5-azauridine-5′-triphosphate.

[0014] In some aspects, the invention provides a method for altering a target B2M polynucleotide sequence in a cell comprising contacting the B2M polynucleotide sequence with a clustered regularly interspaced short palindromic repeats-associated (Cas) protein and from one to two ribonucleic acids, wherein the ribonucleic acids direct Cas protein to and hybridize to a target motif of the target B2M polynucleotide sequence, wherein the target B2M polynucleotide sequence is cleaved, and wherein at least one of the one to two ribonucleic acids target a sequence selected from the group consisting of SEQ ID NO: 9, SEQ ID NO: 10, SEQ ID NO: 11, SEQ ID NO: 12, SEQ ID NO: 13, SEQ ID NO: 14, SEQ ID NO: 15, SEQ ID NO: 16, SEQ ID NO: 17, SEQ ID NO: 18, SEQ ID NO: 19, SEQ ID NO: 20, SEQ ID NO: 21, SEQ ID NO: 22, and SEQ ID NO: 23.

[0015] In some embodiments, each of the one to two ribonucleic acids target a sequence selected from the group consisting of SEQ ID NO: 9, SEQ ID NO: 10, SEQ ID NO: 11, SEQ ID NO: 12, SEQ ID NO: 13, SEQ ID NO: 14, SEQ ID NO: 15, SEQ ID NO: 16, SEQ ID NO: 17, SEQ ID NO: 18, SEQ ID NO: 19, SEQ ID NO: 20, SEQ ID NO: 21, SEQ ID NO: 22, and SEQ ID NO: 23.

[0016] In some aspects, the invention provides a method for treating or preventing a disorder associated with expression of a polynucleotide sequence in a subject, the method comprising: (a) altering a target polynucleotide sequence associated with the disorder in a cell ex vivo by contacting the polynucleotide sequence with a clustered regularly interspaced short palindromic repeats-associated (Cas) protein and from one to two ribonucleic acids, wherein the ribonucleic acids direct Cas protein to and hybridize to a target motif of the target polynucleotide sequence associated with the disorder, wherein the target polynucleotide sequence associated with the disorder is cleaved; (b) altering a target B2M polynucleotide sequence in the cell ex vivo by contacting the target B2M polynucleotide sequence with a clustered regularly interspaced short palindromic repeats-associated (Cas) protein and two ribonucleic acids targeting a sequence selected from the group consisting of SEQ ID NO: 9, SEQ ID NO: 10, SEQ ID NO: 11, SEQ ID NO: 12, SEQ ID NO: 13, SEQ ID NO: 14, SEQ ID NO: 15, SEQ ID NO: 16, SEQ ID NO: 17, SEQ ID NO: 18, SEQ ID NO: 19, SEQ ID NO: 20, SEQ ID NO: 21, SEQ ID NO: 22, and SEQ ID NO: 23; and (c) introducing the cell into the subject, thereby treating or preventing a disorder associated with expression of the polynucleotide sequence.

[0017] In some aspects, the present invention provides a primary human cell or population of primary human cells comprising a genome in which the β2-microglobulin (B2M) gene on chromosome 15 has been edited to delete a contiguous stretch of genomic DNA comprising base pairs 5109 to 7331 (SEQ ID NO: 1; NCBI Reference Sequence: NG_012920.1), thereby eliminating surface expression of MHC Class I protein in the cell or population of cells. In some embodiments, the contiguous stretch of genomic DNA has been deleted by contacting the cell or population of human cells with a Cas protein or a nucleic acid encoding the Cas protein and a pair of ribonucleic acids targeting SEQ ID NO: 16 and SEQ ID NO: 21.

[0018] In some aspects, the invention provides a primary human cell or population of primary human cells comprising a genome in which the β2-microglobulin (B2M) gene on chromosome 15 has been edited to delete a contiguous stretch of genomic DNA, thereby eliminating surface expression of MHC Class I molecules in the cell or population of cells, wherein the contiguous stretch of genomic DNA has been deleted by contacting the cell or population of human cells with a Cas protein or a nucleic acid encoding the Cas protein and a pair of ribonucleic acids targeting SEQ ID NO: 16 and SEQ ID NO: 21.

[0019] In some embodiments, the cell or population of cells are selected from the group consisting of a stem cell, a pluripotent cell, a progenitor cells, a hematopoietic stem and/or progenitor cell, a CD34+ cell selected from the group consisting of a CD34+ mobilized peripheral blood cell, a CD34+ cord blood cell, a CD34+ bone marrow cell, a CD34+CD38-Lineage-CD90+CD45RA− cell, and a CD34+ hematopoietic stem and/or progenitor cell; a CD4+ T cell, a hepatocyte, a somatic cell, and a non-transformed cell.

[0020] In some embodiments, the cells is obtained from a subject suffering from, being treated for, diagnosed with, at risk of developing, or suspected of having, a disorder selected from the group consisting of a genetic disorder, an infection, and cancer.

[0021] In some embodiments, the disorder comprises HIV or AIDs.

[0022] In some embodiments, the cell or population of cells comprises a genome in which the one or more additional genes have been edited to eliminate or reduce their expression.

[0023] In some embodiments, the cell or population of cells comprises a genome in which the CCR5 and/or CXCR4 genes have been edited to eliminate CCR5 and/or CXCR4 surface expression.

[0024] In some aspects, the present invention provides a method for allogeneic administration of cells to a subject in need of such cells, the method comprising: (a) contacting a population of primary cells obtained from a first subject ex vivo with a Cas protein or a nucleic acid encoding a Cas protein and a pair of ribonucleic acids targeting SEQ ID NO: 16 and SEQ ID NO: 21, thereby editing the genome of at least 25% of the primary cells in the population to delete a contiguous stretch of genomic DNA comprising base pairs 5109 to 7331 (SEQ ID NO: 1) in the B2M gene on chromosome 15, wherein the genomically edited cells lack surface expression of MHC Class I protein; and (b) administering the genomically edited cells to a second subject in need of such cells.

[0025] In some embodiments, prior to step of administering, the population of cells is sorted for genomically edited cells. In some embodiments, prior to the step of administering, the population of cells is expanded. In some embodiments, the population of primary cells obtained from the first subject are selected from the group consisting of a stem cell, a pluripotent cell, a progenitor cells, a hematopoietic stem and/or progenitor cells, a CD34+ cell, a CD34+ mobilized peripheral blood cell, a CD34+ cord blood cell, a CD34+ bone marrow cell, a CD34+CD38-Lineage-CD90+CD45RA− cell, a CD34+ hematopoietic stem and/or progenitor cell, a CD4+ T cell, a hepatocyte, a somatic cell, and a non-transformed cell.

[0026] In some embodiments, the second subject is suffering from, being treated for, diagnosed with, at risk of developing, or suspected of having, a disorder selected from the group consisting of a genetic disorder, an infection, and cancer. In some embodiments, the disorder comprises HIV or AIDs.

[0027] In some embodiments, the method comprises prior to the step of administering, contacting the genomically modified cells with Cas protein and one or more guide RNA sequences targeting the CCR5 and/or CXCR4 genes, thereby editing the genome of the genomically modified cells to eliminate or reduce surface expression of CCR5 and/or CXCR4.

[0028] In some aspects, the present invention provides a composition comprising a chimeric nucleic acid, the chimeric nucleic acid comprising: (a) a nucleic acid sequence encoding a Cas protein; (b) a first ribonucleic acid targeting SEQ ID NO: 16; and (c) a second ribonucleic acid targeting SEQ ID NO:21.

[0029] In some embodiments, the composition includes a nucleic acid sequence encoding a detectable marker (e.g., a fluorescent protein, e.g., GFP). In some embodiments, the Cas protein comprises a Cas9 protein or a functional portion thereof.

[0030] In some embodiments, the composition comprises a promoter optimized for increased expression in human cells operably linked to the chimeric nucleic acid, wherein the promoter is selected from the group consisting of a Cytomegalovirus (CMV) early enhancer element and a chicken beta-actin promoter, a chicken beta-actin promoter, an elongation factor-1 alpha promoter, and a ubiquitin promoter. In some embodiments, the chimeric nucleic acid comprises at least one modified nucleotide selected from the group consisting of pseudouridine, 5-methylcytodine, 2-thio-uridine, 5-methyluridine-5′-triphosphate, 4-thiouridine-5′-triphosphate, 5,6-dihydrouridine-5′-triphosphate, and 5-azauridine-5′-triphosphate. In some embodiments, the nucleic acid encoding Cas protein comprises a messenger RNA (mRNA) encoding Cas9 protein. In some embodiments, the mRNA comprises at least one modified nucleotide selected from the group consisting of pseudouridine, 5-methylcytodine, 2-thio-uridine, 5-methyluridine-5′-triphosphate, 4-thiouridine-5′-triphosphate, 5,6-dihydrouridine-5′-triphosphate, and 5-azauridine-5′-triphosphate.

[0031] In some aspects, the invention provides a primary human cell or population of primary human cells comprising a genome in which the β2-microglobulin (B2M) gene on chromosome 15 has been edited to delete a contiguous stretch of genomic DNA, thereby eliminating surface expression of MHC Class I molecules in the cell or population of cells, wherein the contiguous stretch of genomic DNA has been deleted by contacting the cell or population of human cells with a Cas protein or a nucleic acid encoding the Cas protein and a ribonucleic acid targeting a sequence selected from the group consisting of SEQ ID NOs: 419-880.

[0032] In some embodiments, the cell or population of cells are selected from the group consisting of a stem cell, a pluripotent cell, a progenitor cells, a hematopoietic stem and/or progenitor cell, a CD34+ mobilized peripheral blood cell, a CD34+ cord blood cell, a CD34+ bone marrow cell, a CD34+CD38-Lineage-CD90+CD45RA− cell, and a CD34+ hematopoietic stem and/or progenitor cell; a CD4+ T cell, a hepatocyte, a somatic cell, and a non-transformed cell.

[0033] In some embodiments, the cell or cells is obtained from a subject suffering from, being treated for, diagnosed with, at risk of developing, or suspected of having, a disorder selected from the group consisting of a genetic disorder, an infection, and cancer. In some embodiments, the disorder comprises HIV or AIDs. In some embodiments, the cell or population of cells comprises a genome in which one or more additional genes have been edited to eliminate expression.

[0034] In some aspects, the invention provides a method for allogeneic administration of cells to a subject in need of such cells, the method comprising: (a) contacting a population of primary cells obtained from a first subject ex vivo with a Cas protein or a nucleic acid encoding a Cas protein and a ribonucleic acid targeting a sequence selected from the group consisting of SEQ ID NOs: 419-880, thereby editing the genome of at least 25% of the primary cells in the population to delete a contiguous stretch of genomic DNA comprising base pairs 5109 to 7331 (SEQ ID NO: 1) in the B2M gene on chromosome 15, wherein the genomically edited cells lack surface expression of MHC Class I protein; and (b) administering the genomically edited cells to a second subject in need of such cells.

[0035] In some embodiments, prior to the step of administering, the population of cells is sorted for genomically edited cells. In some embodiments, prior to the step of administering, the population of cells is expanded. In some embodiments, the population of primary cells are selected from the group consisting of a stem cell, a pluripotent cell, a progenitor cells, a hematopoietic stem and/or progenitor cells, a CD34+ cell, a CD34+ mobilized peripheral blood cell, a CD34+ cord blood cell, a CD34+ bone marrow cell, a CD34+CD38-Lineage-CD90+CD45RA− cell, a CD34+ hematopoietic stem and/or progenitor cell, a CD4+ T cell, a hepatocyte, a somatic cell, and a non-transformed cell. In some embodiments, the second subject is suffering from, being treated for, diagnosed with, at risk of developing, or suspected of having, a disorder selected from the group consisting of a genetic disorder, an infection, and cancer. In some embodiments, the disorder comprises HIV or AIDs. In some embodiments, the method includes, prior to the step of administering, editing the genome of the genomically modified cells to eliminate or reduce expression of one or more additional genes.

[0036] In some embodiments, the invention provides a composition comprising a chimeric nucleic acid, the chimeric nucleic acid comprising: (a) a nucleic acid sequence encoding a Cas protein; and at least one ribonucleic acid targeting a sequence selected from the group consisting of SEQ ID NOs: 419-880.

[0037] In some embodiments, the composition comprising a nucleic acid sequence encoding a detectable marker. In some embodiments, the Cas protein comprises a Cpf1 protein or a functional portion thereof. In some embodiments, the composition includes a promoter optimized for increased expression in human cells operably linked to the chimeric nucleic acid, wherein the promoter is selected from the group consisting of a Cytomegalovirus (CMV) early enhancer element and a chicken beta-actin promoter, a chicken beta-actin promoter, an elongation factor-1 alpha promoter, and a ubiquitin promoter. In some embodiments, the chimeric nucleic acid comprises at least one modified nucleotide selected from the group consisting of pseudouridine, 5-methylcytodine, 2-thio-uridine, 5-methyluridine-5′-triphosphate, 4-thiouridine-5′-triphosphate, 5,6-dihydrouridine-5′-triphosphate, and 5-azauridine-5′-triphosphate. In some embodiment, the nucleic acid encoding Cas protein comprises a messenger RNA (mRNA) encoding Cpf1 protein. In some embodiments, the mRNA comprises at least one modified nucleotide selected from the group consisting of pseudouridine, 5-methylcytodine, 2-thio-uridine, 5-methyluridine-5′-triphosphate, 4-thiouridine-5′-triphosphate, 5,6-dihydrouridine-5′-triphosphate, and 5-azauridine-5′-triphosphate.

[0038] In some aspects, the invention provides a method for altering a target B2M polynucleotide sequence in a cell comprising contacting the B2M polynucleotide sequence with a clustered regularly interspaced short palindromic repeats-associated (Cas) protein and at least one ribonucleic acid, wherein the ribonucleic acid directs Cas protein to and hybridize to a target motif of the target B2M polynucleotide sequence, wherein the target B2M polynucleotide sequence is cleaved, and wherein the at least one ribonucleic acid targets a sequence selected from the group consisting of SEQ ID NOs: 419-880.

[0039] In some aspects, the invention provides a method for treating or preventing a disorder associated with expression of a polynucleotide sequence in a subject, the method comprising: (a) altering a target polynucleotide sequence associated with the disorder in a cell ex vivo by contacting the polynucleotide sequence with a clustered regularly interspaced short palindromic repeats-associated (Cas) protein and at least one ribonucleic acid, wherein the ribonucleic acid directs Cas protein to and hybridizes to a target motif of the target polynucleotide sequence associated with the disorder, wherein the target polynucleotide sequence associated with the disorder is cleaved; (b) altering a target B2M polynucleotide sequence in the cell ex vivo by contacting the target B2M polynucleotide sequence with a clustered regularly interspaced short palindromic repeats-associated (Cas) protein and at least one ribonucleic acid targeting a sequence selected from the group consisting of SEQ ID NOs: 419-880; and (c) introducing the cell into the subject, thereby treating or preventing a disorder associated with expression of the polynucleotide sequence.

[0040] In some aspects, the present invention provides a primary human cell or population of primary human cells comprising a genome in which the β2-microglobulin (B2M) gene on chromosome 15 has been edited to delete a contiguous stretch of genomic DNA comprising base pairs 5109 to 7331 (SEQ ID NO: 1; NCBI Reference Sequence: NG_012920.1), thereby eliminating surface expression of MHC Class I protein in the cell or population of cells. In some embodiments, the contiguous stretch of genomic DNA has been deleted by contacting the cell or population of human cells with a Cas protein or a nucleic acid encoding the Cas protein and a ribonucleic acid targeting a sequence selected from the group consisting of SEQ ID NOs: 419-880.

[0041] In some aspects, the invention provides a primary human cell or population of primary human cells comprising a genome in which the β2-microglobulin (B2M) gene on chromosome 15 has been edited to delete a contiguous stretch of genomic DNA, thereby eliminating surface expression of MHC Class I molecules in the cell or population of cells, wherein the contiguous stretch of genomic DNA has been deleted by contacting the cell or population of human cells with a Cas protein or a nucleic acid encoding the Cas protein and a ribonucleic acid targeting a sequence selected from the group consisting of SEQ ID NOs: 419-880.

[0042] In some embodiments, the cell or population of cells are selected from the group consisting of a stem cell, a pluripotent cell, a progenitor cells, a hematopoietic stem and/or progenitor cell, a CD34+ cell selected from the group consisting of a CD34+ mobilized peripheral blood cell, a CD34+ cord blood cell, a CD34+ bone marrow cell, a CD34+CD38-Lineage-CD90+CD45RA− cell, and a CD34+ hematopoietic stem and/or progenitor cell; a CD4+ T cell, a hepatocyte, a somatic cell, and a non-transformed cell.

[0043] In some embodiments, the cells is obtained from a subject suffering from, being treated for, diagnosed with, at risk of developing, or suspected of having, a disorder selected from the group consisting of a genetic disorder, an infection, and cancer.

[0044] In some embodiments, the disorder comprises HIV or AIDs.

[0045] In some embodiments, the cell or population of cells comprises a genome in which the one or more additional genes have been edited to eliminate or reduce their expression.

[0046] In some embodiments, the cell or population of cells comprises a genome in which the CCR5 and/or CXCR4 genes have been edited to eliminate CCR5 and/or CXCR4 surface expression.

[0047] In some aspects, the present invention provides a method for allogeneic administration of cells to a subject in need of such cells, the method comprising: (a) contacting a population of primary cells obtained from a first subject ex vivo with a Cas protein or a nucleic acid encoding a Cas protein and a ribonucleic acid targeting a sequence selected from the group consisting of SEQ ID NOs: 419-880, thereby editing the genome of at least 25% of the primary cells in the population to delete a contiguous stretch of genomic DNA comprising base pairs 5109 to 7331 (SEQ ID NO: 1) in the B2M gene on chromosome 15, wherein the genomically edited cells lack surface expression of MHC Class I protein; and (b) administering the genomically edited cells to a second subject in need of such cells.

[0048] In some embodiments, prior to step of administering, the population of cells is sorted for genomically edited cells. In some embodiments, prior to the step of administering, the population of cells is expanded. In some embodiments, the population of primary cells obtained from the first subject are selected from the group consisting of a stem cell, a pluripotent cell, a progenitor cells, a hematopoietic stem and/or progenitor cells, a CD34+ cell, a CD34+ mobilized peripheral blood cell, a CD34+ cord blood cell, a CD34+ bone marrow cell, a CD34+CD38-Lineage-CD90+CD45RA− cell, a CD34+ hematopoietic stem and/or progenitor cell, a CD4+ T cell, a hepatocyte, a somatic cell, and a non-transformed cell.

[0049] In some embodiments, the second subject is suffering from, being treated for, diagnosed with, at risk of developing, or suspected of having, a disorder selected from the group consisting of a genetic disorder, an infection, and cancer. In some embodiments, the disorder comprises HIV or AIDs.

[0050] In some embodiments, the method comprises prior to the step of administering, contacting the genomically modified cells with Cas protein and one or more guide RNA sequences targeting the CCR5 and/or CXCR4 genes, thereby editing the genome of the genomically modified cells to eliminate or reduce surface expression of CCR5 and/or CXCR4.

[0051] In some aspects, the present invention provides a composition comprising a chimeric nucleic acid, the chimeric nucleic acid comprising: (a) a nucleic acid sequence encoding a Cas protein; and (b) a ribonucleic acid targeting a sequence selected from the group consisting of SEQ ID NOs: 419-880.

[0052] In some embodiments, the composition includes a nucleic acid sequence encoding a detectable marker (e.g., a fluorescent protein, e.g., GFP). In some embodiments, the Cas protein comprises a Cpf1 protein or a functional portion thereof.

[0053] In some embodiments, the composition comprises a promoter optimized for increased expression in human cells operably linked to the chimeric nucleic acid, wherein the promoter is selected from the group consisting of a Cytomegalovirus (CMV) early enhancer element and a chicken beta-actin promoter, a chicken beta-actin promoter, an elongation factor-1 alpha promoter, and a ubiquitin promoter. In some embodiments, the chimeric nucleic acid comprises at least one modified nucleotide selected from the group consisting of pseudouridine, 5-methylcytodine, 2-thio-uridine, 5-methyluridine-5′-triphosphate, 4-thiouridine-5′-triphosphate, 5,6-dihydrouridine-5′-triphosphate, and 5-azauridine-5′-triphosphate. In some embodiments, the nucleic acid encoding Cas protein comprises a messenger RNA (mRNA) encoding Cas9 protein. In some embodiments, the mRNA comprises at least one modified nucleotide selected from the group consisting of pseudouridine, 5-methylcytodine, 2-thio-uridine, 5-methyluridine-5′-triphosphate, 4-thiouridine-5′-triphosphate, 5,6-dihydrouridine-5′-triphosphate, and 5-azauridine-5′-triphosphate.

[0054] In some aspects, the invention provides a method for altering a target B2M polynucleotide sequence in a cell comprising contacting the B2M polynucleotide sequence with a clustered regularly interspaced short palindromic repeats-associated (Cas) protein and from one to two ribonucleic acids, wherein the ribonucleic acids direct Cas protein to and hybridize to a target motif of the target B2M polynucleotide sequence, wherein the target B2M polynucleotide sequence is cleaved, and wherein at least one of the one to two ribonucleic acids target a sequence selected from the group consisting of SEQ ID NOs: 881-2609.

[0055] In some embodiments, each of the one to two ribonucleic acids target a sequence selected from the group consisting of SEQ ID NOs: 881-2609.

[0056] In some aspects, the invention provides a method for treating or preventing a disorder associated with expression of a polynucleotide sequence in a subject, the method comprising: (a) altering a target polynucleotide sequence associated with the disorder in a cell ex vivo by contacting the polynucleotide sequence with a clustered regularly interspaced short palindromic repeats-associated (Cas) protein and from one to two ribonucleic acids, wherein the ribonucleic acids direct Cas protein to and hybridize to a target motif of the target polynucleotide sequence associated with the disorder, wherein the target polynucleotide sequence associated with the disorder is cleaved; (b) altering a target B2M polynucleotide sequence in the cell ex vivo by contacting the target B2M polynucleotide sequence with a clustered regularly interspaced short palindromic repeats-associated (Cas) protein and two ribonucleic acids targeting a sequence selected from the group consisting of SEQ ID NOs: 881-2609; and (c) introducing the cell into the subject, thereby treating or preventing a disorder associated with expression of the polynucleotide sequence.

### BRIEF DESCRIPTION OF THE DRAWINGS

[0057] The patent or application file contains at least one drawing executed in color. Copies of this patent or patent application publication with color drawings will be provided by the Office upon request and payment of the necessary fee.

[0058] FIG. 1 shows an exemplary 2.2 kb stretch of contiguous genomic DNA deleted from the human B2M gene that results in ablation of major histocompatibility complex (MHC) class I molecule surface expression in cells edited using the B2M gRNAs of the present disclosure.

[0059] FIG. 2 shows exemplary gRNA target sequences useful for targeting the human CCR5 gene using Cas9.

[0060] FIG. 3 shows exemplary gRNA target sequences useful for targeting the human B2M gene using Cas9.

[0061] FIG. 4 shows an exemplary amino acid sequence of a Cas protein. Yellow highlights indicate Ruv-C-like domain. Underlining indicates HNH nuclease domain.

[0062] FIGS. 5A, 5B, 5C, 5D, 5E, 5F, 5G and 5H demonstrate targeting clinically relevant loci in human cells using CRISPR/Cas9. FIG. 5A is a schematic of gRNAs targeting B2M. FIG. 5B is a histogram of B2M surface expression in HEK293T cells. FIG. 5C shows B2M deletion efficiency with various gRNAs in HEK293T cells; n=3 (mean±SEM). FIG. 5D is a schematic of gRNAs targeting CCR5. Orange and green arrows represent primer pairs used to amplify the region for analysis. FIG. 5E shows results of Surveyor assays of each gRNA targeting CCR5 in K562 cells. % InDels is indicated under each guide. FIG. 5F illustrates B2M deletion efficiency of selected gRNAs in primary CD4+ T cells in comparison to 293T cells; n=6 (mean±SEM). FIG. 5G shows results of surveyor assay of crCCR5_A and crCCR5_B targeting CCR5 in K562 cells and HSPCs. FIG. 5H illustrates clonal deletion efficiency of crCCR5_A and crCCR5_B targeting of CCR5 in HSPCs (n=2) as determined by Sanger sequencing. (Note: crB2M_14 is not depicted in panel A schematic, as it is located 20 Kb downstream of coding sequence.). See also FIG. 6.

[0063] FIGS. 6A, 6B, 6C, 6D and 6E demonstrate an evaluation of on target mutational efficiencies of various gRNAs targeting B2M. FIG. 6A shows B2M deletion efficiency for all gRNAs targeting B2M locus in HEK293T cells as measured by flow cytometry. Pooled data from 3 independent experiments shown as mean±SEM. FIG. 6B shows B2M deletion efficiencies of selected guides in HEK293T cells, measured as % InDels by CEL Surveyor assay. FIG. 6C is a comparison of B2M surface expression in HEK293T cells and primary CD4+ T cells when transfected with Cas9 and guide crB2M_13. FIG. 6D shows B2M deletion efficiency for selected guides targeting the B2M locus in primary CD4+ T-cells, as measured by flow cytometry. FIG. 6E shows B2M deletion efficiencies of selected guides in primary CD4+ T cells, measured as % InDels by CEL Surveyor assay.

[0064] FIGS. 7A, 7B, 7C, 7D and 7E depict a dual gRNA approach for CRISPR/Cas9 genome editing in primary human hematopoietic stem and effector cells. FIG. 7A is a schematic of dual gRNA approach for targeting the B2M locus. gRNA pairs are in red. The offset in base pairs between Cas9 sites for each gRNA combination (right panel). FIG. 7B shows B2M deletion efficiency in CD4+ T cells for 6 dual gRNA combinations (n=3; mean±SEM). FIG. 7C is a FACS plots showing loss of B2M expression of either crB2M_13 or crB2M_8 alone or in combination in primary CD4+ T cells. FIG. 7D is a schematic of dual gRNA approach for targeting CCR5. gRNA pairs are shown in red. Orange and green arrowheads represent primer pairs used to amplify the region. The offset between the Cas9 sites of each gRNA pair (right panel). FIG. 7E is a gel electrophoresis image of CD34+HSPCs derived clones targeted with crCCR5_D+Q analyzed by PCR. Note the deletion of the 205 bp region between the two gRNA cutting sites (top panel; WT: wild type; ΔCCR5: deleted; green * denotes a WT clone; orange * denotes a heterozygous clone; and red * denotes a homozygous deleted clone). Clonal deletion efficiency for three dual gRNA combinations targeting CCR5 in CD34+ HSPCs (n=4; % mean±SEM; bottom panel).

[0065] FIGS. 8A, 8B, 8C, 8D, 8E, 8F and 8G demonstrate the targeting efficiency of dual gRNA combinations. FIG. 8A shows B2M deletion efficiency for 6 dual gRNA combinations from three independent donors as measured by flow cytometry. FIG. 8B are FACS plots showing loss of MHC class I surface expression (bottom panel) following B2M deletion (top panel). FIG. 8C is a schematic of the single cell nested PCR strategy for the B2M locus (left panel), black and gray arrowheads: control primer pairs, orange and green arrowheads: primer pairs flanking targeting region. % B2M null single cells is shown (right panel, n=301). FIG. 8D is a Sanger sequencing chromatogram showing predicted deletion of targeted region at B2M locus. FIG. 8E shows clonal CCR5 deletion efficiency for three dual gRNA combinations in CD34+ HSPC-mPB obtained from multiple donors. DNA isolated from individual colony was analyzed by PCR and gel electrophoresis. FIG. 8F is a schematic of the single cell nested PCR strategy (left panel) for determining deletion of CCR5 in primary CD4+ T cells. % CCR5 null single cells is shown (right panel, n=363). FIG. 8G shows Sanger sequencing chromatogram shows predicted deletion at targeted region.

[0066] FIGS. 9A and 9B demonstrate potential off-target sites identified in CCR5 homologue CCR2 and analysis of events detected at the single off-target site in which mutagenesis was significantly detected above background. FIG. 9A shows a sequence alignment of CCR5 gRNAs utilized in this study in relation to the closest homologous sequence in CCR2 showing mismatched nucleotides in bold. Noteworthy is the fact that gRNA crCCR5_B, which yielded the sole significantly detected off-target mutagenesis in CCR2 (detailed in panel B), has 3 nucleotide mismatches, which are distal to the PAM (underlined) and seed (grey box) sequences. FIG. 9B shows a Table depicting results of in-depth analyses of all sequence reads at the single off-target site in which mutagenesis was significantly detected above background in both capture libraries treated with the associated gRNA (B; libraries treated with single gRNA crCCR5_B & dual-gRNA crCCR5_A+B), as well as the library treated with gRNA crCCR5_A as a comparison. Total off-target mutation frequency at this site was 0.6% in the single gRNA treatment (crCCR5_B) and notably decreased to 0.24% in the dual gRNA treatment (crCCR5_A+B) in which gRNA plasmid concentration of each gRNA was half of that utilized in single gRNA treatments.

[0067] FIGS. 10A, 10B, 10C and 10D demonstrate that CCR5-edited CD34+ HSPCs retain multi-lineage potential. FIG. 10A shows representative pictures of colonies formed in methylcellulose CFC assay (left panel) with quantified data on colony number and types are presented (right panel). Representative FACS plot showing human hematopoietic cell (hCD45+) engraftment and multi-lineage reconstitution at 12 weeks post-transplantation in the bone marrow (FIG. 10B) and spleen (FIG. 10C) of NSG recipient mice. FIG. 10D shows PCR results confirmed predicted deletion of targeted region at CCR5 locus in human hematopoietic cells sorted from NSG mice transplanted with CRISPR/Cas9-treated HSPCs. PBMC (human peripheral blood mononuclear cells) from healthy donor taken as control. (WT: wild type, ACCR5: deleted).

[0068] FIGS. 11A, 11B, 11C and 11D demonstrate targeted capture and extremely deep sequencing of on-target and predicted off-target sites in CD34+ HSPCs. FIG. 11A is a schematic overview of targeted capture and deep sequencing of on-target and predicted off-target sites (red bar). A 500 bp region flanking the cutting site (in yellow) were included in sequence analysis for detection of structural rearrangements, including translocations. Probe sets are indicated in blue. FIG. 11B are plots showing consistent sequencing depth coverage at both on-target (left panel) and off-target (right panel) sites, achieving a coverage exceeding 3,000× for all on-target sites. Decrease in sequencing depth at the on-target sites in dual-gRNA libraries is marked by arrow, supporting predicted deletions (bottom left; i=35 bp, ii=205 bp, iii=205 bp). FIG. 11C shows a precise estimation of on-target mutation allele frequencies by capture sequencing. Notably, the observed rate of effective null mutation exceeds previous estimates by PCR validation of predictable deletions, as smaller InDels and inversions also occur at appreciable frequencies. FIG. 11D shows an estimation of mutation frequencies at predicted off-target sites (*One off-target site was statistically different from controls following correction for multiple comparisons; p≤7.6×10⁻¹¹). N-fold enrichment is determined based on the ratio of non-reference reads in treated libraries compared to untreated library. Each value represents the average of all off-target sites for a given single gRNA or dual-gRNA experiment. Enrichment of 1 is equivalent to baseline (untreated control). ** For reference to on-target enrichments, on-target combined represents the proportion of non-reference reads (including single and dual-gRNA treatments using a given gRNA) to total reads at on-target sites in treatment compared to control.

[0069] FIG. 12 shows predicted gRNA mapping in Ensembl GRCh37v71.

[0070] FIG. 13 shows guide pair crCCR5_A+B on-target alleles.

[0071] FIG. 14 shows guide pair crCCR5_C+D on-target alleles.

[0072] FIG. 15 shows guide pair crCCR5_D+Q on-target alleles.

[0073] FIG. 16A shows off-target sites with statistically significant mutational burden and FIG. 16B shows a comparison of on- and off-target mutational burdens.

[0074] FIG. 17 shows exemplary gRNA target sequences useful for targeting the human B2M gene using Cpf1.

[0075] FIG. 18 demonstrates B2M deletion efficiencies of selected guides in 293T cells. Arrows on the Surveyor assays show nuclease cleavage bonds.

[0076] FIG. 19 demonstrates a comparison of B2M surface expression in 293T cells when transfected with AsCpf1 and guide crB2M.

[0077] FIG. 20 demonstrates a comparison of B2M surface expression in 293T cells when transfected with LbCpf1 and guide crB2M.

[0078] FIG. 21 depicts Cpf1 crRNA design and cloning information.

[0079] FIGS. 22A, B, C, D, E, F, and G demonstrate generation and characterization of B2M KO JEG3 cells using TALENs. FIG. 22A depicts a design of B2M TALEN and induced mutations. FIG. 22B depicts an analysis of B2M at the transcript and protein levels. FIG. 22C demonstrates an analysis of B2M at the surface expression level. FIG. 22D demonstrates that ΔB2M clones are devoid of MHC-I surface expression. FIG. 22E demonstrates that ΔB2M clones are devoid of HLA-G surface expression. FIG. 22F demonstrates that ΔB2M clones are devoid of HLA-C surface expression. FIG. 22G demonstrates that ΔB2M clones are devoid of HLA-E surface expression.

### DETAILED DESCRIPTION OF THE INVENTION

[0080] Work described herein demonstrates methods of B2M allele targeting using any system available, such as CRISPR/Cas or TALEN systems, resulting in primary human cell populations in which at least 25% of cells in the population comprise a deletion of a 2.2 kb stretch of contiguous genomic DNA in the B2M gene on chromosome 15, and as a result of such deletion those cells do not express MHC class I molecules on their surface. The genome edited cells thus modified can be used in allogeneic cell, tissue, or organ transplantations to reduce or eliminate the likelihood of triggering unwanted recipient immune responses when such cells are transplanted into the recipient. Moreover, methods of treatment (e.g., methods of treating HIV infection) utilizing compositions comprising mutant B2M alleles, as well as methods of administering such cells are also provided.

[0081] As used herein, the term “contacting” (i.e., contacting a polynucleotide sequence with a clustered regularly interspaced short palindromic repeats-associated (Cas) protein and/or ribonucleic acids) is intended to include incubating the Cas protein and/or the ribonucleic acids in the cell together in vitro (e.g., adding the Cas protein or nucleic acid encoding the Cas protein to cells in culture) or contacting a cell ex vivo. The step of contacting a target polynucleotide sequence with a Cas protein and/or ribonucleic acids as disclosed herein can be conducted in any suitable manner. For example, the cells may be treated in adherent culture, or in suspension culture. It is understood that the cells contacted with a Cas protein and/or ribonucleic acids as disclosed herein can also be simultaneously or subsequently contacted with another agent, such as a growth factor or other differentiation agent or environments to stabilize the cells, or to differentiate the cells further.

[0082] The terms “treat”, “treating”, “treatment”, etc., as applied to an isolated cell, include subjecting the cell to any kind of process or condition or performing any kind of manipulation or procedure on the cell. As applied to a subject, the terms refer to administering a cell or population of cells in which a target polynucleotide sequence (e.g., B2M) has been altered ex vivo according to the methods described herein to an individual. The individual is usually ill or injured, or at increased risk of becoming ill relative to an average member of the population and in need of such attention, care, or management.

[0083] As used herein, the term “treating” and “treatment” refers to administering to a subject an effective amount of cells with target polynucleotide sequences altered ex vivo according to the methods described herein so that the subject has a reduction in at least one symptom of the disease or an improvement in the disease, for example, beneficial or desired clinical results. For purposes of this invention, beneficial or desired clinical results include, but are not limited to, alleviation of one or more symptoms, diminishment of extent of disease, stabilized (i.e., not worsening) state of disease, delay or slowing of disease progression, amelioration or palliation of the disease state, and remission (whether partial or total), whether detectable or undetectable. Treating can refer to prolonging survival as compared to expected survival if not receiving treatment. Thus, one of skill in the art realizes that a treatment may improve the disease condition, but may not be a complete cure for the disease. As used herein, the term “treatment” includes prophylaxis. Alternatively, treatment is “effective” if the progression of a disease is reduced or halted. “Treatment” can also mean prolonging survival as compared to expected survival if not receiving treatment. Those in need of treatment include those already diagnosed with a disorder associated with expression of a polynucleotide sequence, as well as those likely to develop such a disorder due to genetic susceptibility or other factors.

[0084] By “treatment,” “prevention” or “amelioration” of a disease or disorder is meant delaying or preventing the onset of such a disease or disorder, reversing, alleviating, ameliorating, inhibiting, slowing down or stopping the progression, aggravation or deterioration the progression or severity of a condition associated with such a disease or disorder. In one embodiment, the symptoms of a disease or disorder are alleviated by at least 5%, at least 10%, at least 20%, at least 30%, at least 40%, or at least 50%.

[0085] The present invention contemplates altering target polynucleotide sequences in any manner which is available to the skilled artisan utilizing a CRISPR/Cas system of the present invention. Any CRISPR/Cas system that is capable of altering a target polynucleotide sequence in a cell can be used. Such CRISPR-Cas systems can employ a variety of Cas proteins (Haft et al. PLoS Comput Biol. 2005;1(6)e60). The molecular machinery of such Cas proteins that allows the CRISPR/Cas system to alter target polynucleotide sequences in cells include RNA binding proteins, endo- and exo-nucleases, helicases, and polymerases. In some embodiments, the CRISPR/Cas system is a CRISPR type I system. In some embodiments, the CRISPR/Cas system is a CRISPR type II system. In some embodiments, the CRISPR/Cas system is a CRISPR type V system.

[0086] In additional or alternative aspects, the present invention contemplates altering target polynucleotide sequences in any manner which is available to the skilled artisan, e.g., utilizing a TALEN system. It should be understood that although examples of methods utilizing CRISPR/Cas (e.g., Cas9 and cpf1) and TALEN are described in detail herein, the invention is not limited to the use of these methods/systems. Other methods of targeting, e.g., B2M, to reduce or ablate expression in target cells known to the skilled artisan can be utilized herein.

[0087] The methods of the present invention can be used to alter a target polynucleotide sequence in a cell. The present invention contemplates altering target polynucleotide sequences in a cell for any purpose. In some embodiments, the target polynucleotide sequence in a cell is altered to produce a mutant cell. As used herein, a “mutant cell” refers to a cell with a resulting genotype that differs from its original genotype. In some instances, a “mutant cell” exhibits a mutant phenotype, for example when a normally functioning gene is altered using the CRISPR/Cas systems of the present invention. In other instances, a “mutant cell” exhibits a wild-type phenotype, for example when a CRISPR/Cas system of the present invention is used to correct a mutant genotype. In some embodiments, the target polynucleotide sequence in a cell is altered to correct or repair a genetic mutation (e.g., to restore a normal phenotype to the cell). In some embodiments, the target polynucleotide sequence in a cell is altered to induce a genetic mutation (e.g., to disrupt the function of a gene or genomic element).

[0088] In some embodiments, the alteration is an indel. As used herein, “indel” refers to a mutation resulting from an insertion, deletion, or a combination thereof. As will be appreciated by those skilled in the art, an indel in a coding region of a genomic sequence will result in a frameshift mutation, unless the length of the indel is a multiple of three. In some embodiments, the alteration is a point mutation. As used herein, “point mutation” refers to a substitution that replaces one of the nucleotides. A CRISPR/Cas system of the present invention can be used to induce an indel of any length or a point mutation in a target polynucleotide sequence.

[0089] In some embodiments, the alteration results in a knock out of the target polynucleotide sequence or a portion thereof. Knocking out a target polynucleotide sequence or a portion thereof using a CRISPR/Cas system of the present invention can be useful for a variety of applications. For example, knocking out a target polynucleotide sequence in a cell can be performed in vitro for research purposes. For ex vivo purposes, knocking out a target polynucleotide sequence in a cell can be useful for treating or preventing a disorder associated with expression of the target polynucleotide sequence (e.g., by knocking out a mutant allele in a cell ex vivo and introducing those cells comprising the knocked out mutant allele into a subject).

[0090] As used herein, “knock out” includes deleting all or a portion of the target polynucleotide sequence in a way that interferes with the function of the target polynucleotide sequence. For example, a knock out can be achieved by altering a target polynucleotide sequence by inducing an indel in the target polynucleotide sequence in a functional domain of the target polynucleotide sequence (e.g., a DNA binding domain). Those skilled in the art will readily appreciate how to use the CRISPR/Cas systems of the present invention to knock out a target polynucleotide sequence or a portion thereof based upon the details described herein.

[0091] In some embodiments, the alteration results in reduced expression of the target polynucleotide sequence. The terms “decrease,” “reduced,” “reduction,” and “decrease” are all used herein generally to mean a decrease by a statistically significant amount. However, for avoidance of doubt, decrease,” “reduced,” “reduction,” “decrease” means a decrease by at least 10% as compared to a reference level, for example a decrease by at least about 20%, or at least about 30%, or at least about 40%, or at least about 50%, or at least about 60%, or at least about 70%, or at least about 80%, or at least about 90% or up to and including a 100% decrease (i.e. absent level as compared to a reference sample), or any decrease between 10-100% as compared to a reference level.

[0092] The terms “increased”, “increase” or “enhance” or “activate” are all used herein to generally mean an increase by a statically significant amount; for the avoidance of any doubt, the terms “increased”, “increase” or “enhance” or “activate” means an increase of at least 10% as compared to a reference level, for example an increase of at least about 20%, or at least about 30%, or at least about 40%, or at least about 50%, or at least about 60%, or at least about 70%, or at least about 80%, or at least about 90% or up to and including a 100% increase or any increase between 10-100% as compared to a reference level, or at least about a 2-fold, or at least about a 3-fold, or at least about a 4-fold, or at least about a 5-fold or at least about a 10-fold increase, or any increase between 2-fold and 10-fold or greater as compared to a reference level.

[0093] The term “statistically significant” or “significantly” refers to statistical significance and generally means a two standard deviation (2SD) below normal, or lower, concentration of the marker. The term refers to statistical evidence that there is a difference. It is defined as the probability of making a decision to reject the null hypothesis when the null hypothesis is actually true. The decision is often made using the p-value.

[0094] In some embodiments, the alteration is a homozygous alteration. In some embodiments, the alteration is a heterozygous alteration.

[0095] In some embodiments, the alteration results in correction of the target polynucleotide sequence from an undesired sequence to a desired sequence. The CRISPR/Cas systems of the present invention can be used to correct any type of mutation or error in a target polynucleotide sequence. For example, the CRISPR/Cas systems of the present invention can be used to insert a nucleotide sequence that is missing from a target polynucleotide sequence due to a deletion. The CRISPR/Cas systems of the present invention can also be used to delete or excise a nucleotide sequence from a target polynucleotide sequence due to an insertion mutation. In some instances, the CRISPR/Cas systems of the present invention can be used to replace an incorrect nucleotide sequence with a correct nucleotide sequence (e.g., to restore function to a target polynucleotide sequence that is impaired due to a loss of function mutation, i.e., a SNP).

[0096] The CRISPR/Cas systems of the present invention can alter target polynucleotides with surprisingly high efficiency as compared to conventional CRISPR/Cas systems. In certain embodiments, the efficiency of alteration is at least about 5%. In certain embodiments, the efficiency of alteration is at least about 10%. In certain embodiments, the efficiency of alteration is from about 10% to about 80%. In certain embodiments, the efficiency of alteration is from about 30% to about 80%. In certain embodiments, the efficiency of alteration is from about 50% to about 80%. In some embodiments, the efficiency of alteration is greater than or equal to about 80%.

[0097] The CRISPR/Cas systems of the present invention can be used to alter any target polynucleotide sequence in a cell. Those skilled in the art will readily appreciate that desirable target polynucleotide sequences to be altered in any particular cell may correspond to any genomic sequence for which expression of the genomic sequence is associated with a disorder or otherwise facilitates entry of a pathogen into the cell. For example, a desirable target polynucleotide sequence to alter in a cell may be a polynucleotide sequence corresponding to a genomic sequence which contains a disease associated single polynucleotide polymorphism. In such example, the CRISPR/Cas systems of the present invention can be used to correct the disease associated SNP in a cell by replacing it with a wild-type allele. As another example, a polynucleotide sequence of a target gene which is responsible for entry or proliferation of a pathogen into a cell may be a suitable target for deletion or insertion to disrupt the function of the target gene to prevent the pathogen from entering the cell or proliferating inside the cell.

[0098] In some embodiments, the target polynucleotide sequence is a genomic sequence. In some embodiments, the target polynucleotide sequence is a human genomic sequence. In some embodiments, the target polynucleotide sequence is a mammalian genomic sequence. In some embodiments, the target polynucleotide sequence is a vertebrate genomic sequence.

[0099] In some embodiments, a target polynucleotide sequence is a pathogenic genomic sequence. Exemplary pathogenic genomic sequences include, but are not limited to a viral genomic sequence, a bacterial genomic sequence, a fungal genomic sequence, a toxin genomic sequence, or a parasitic genomic sequence. In such embodiments, the CRISPR/Cas systems of the present invention can be used to disrupt the function of a pathogen (e.g., to treat or prevent an infection by the pathogen) by cleaving a genomic sequence of the pathogen (e.g., a genomic sequence that is critical for entry into a cell, or responsible for multiplication, growth or survival once the pathogen is inside a cell).

[0100] In some embodiments, the target polynucleotide sequence is beta-2-microglobulin (B2M; Gene ID: 567). The B2M polynucleotide sequence encodes a serum protein associated with the heavy chain of the major histocompatibility complex (MHC) class I molecules which are expressed on the surface of virtually all nucleated cells. B2M protein comprises a beta-pleated sheet structure that has been found to form amyloid fibrils in certain pathological conditions. The B2M gene has 4 exons which span approximately 8 kb. B2M has been observed in the serum of normal individuals and in elevated amounts in urine from patients having Wilson disease, cadmium poisoning, and various conditions leading to renal tubular dysfunction. Other pathological conditions known to be associated with the B2M include, without limitation, a homozygous mutation (e.g., ala11pro) in the B2M gene has been reported in individuals having familial hypercatabolic hypoproteinemia, a heterozygous mutation (e.g., asp76asn) in the B2M gene has been reported in individuals having familial visceral amyloidosis.

[0101] In some embodiments, the target polynucleotide sequence is a variant of B2M. In some embodiments, the target polynucleotide sequence is a homolog of B2M. In some embodiments, the target polynucleotide sequence is an ortholog of B2M.

[0102] In some aspects, the present disclosure provides a primary human cell or population of primary human cells comprising a genome in which the β2-microglobulin (B2M) gene on chromosome 15 has been edited to delete a contiguous stretch of genomic DNA comprising base pairs 5109 to 7331 (SEQ ID NO: 1) of NCBI Reference Sequence: NG_012920.1, thereby eliminating surface expression of MHC class I molecules in the cell or population of cells.

[0103] The contiguous stretch of genomic DNA can be deleted by contacting the cell or population of human cells with a Cas protein or a nucleic acid encoding the Cas protein and a pair of ribonucleic acids targeting SEQ ID NO: 16 and SEQ ID NO: 21.

[0104] The contiguous stretch of genomic DNA can be deleted by contacting the cell or population of human cells with a Cas protein or a nucleic acid encoding the Cas protein and a single ribonucleic acid targeting a sequence selected from the group consisting of SEQ ID NOs: 419-880.

[0105] The present disclosure contemplates ablating MHC class I molecule surface expression in any primary human cell population to produce cells which reduce or eliminate the likelihood of triggering unwanted host immune responses when transplanted (e.g., allogeneic transplantation). The cells can be obtained from a subject suffering from, being treated for, diagnosed with, suspected of having, or at increased risk of developing, the disorder such as a genetic disorder, an infection (e.g., HIV or AIDS), and cancer. The cells can also be obtained from a normal healthy subject not suffering from, being treated for, diagnosed, suspected of having, or at increased risk of developing, the disorder.

[0106] The present invention contemplates genomically editing primary human cells to cleave B2M gene sequences, as well as editing the genome of such cells to alter one or more additional target polynucleotide sequences.

[0107] In some aspects, the invention provides a method for altering a target B2M polynucleotide sequence in a cell comprising contacting the B2M polynucleotide sequence with a clustered regularly interspaced short palindromic repeats-associated (Cas) protein and from one to two ribonucleic acids, wherein the ribonucleic acids direct Cas protein to and hybridize to a target motif of the target B2M polynucleotide sequence, wherein the target B2M polynucleotide sequence is cleaved, and wherein at least one of the one to two ribonucleic acids targets a sequence selected from the group consisting of SEQ ID NO: 9, SEQ ID NO: 10, SEQ ID NO: 11, SEQ ID NO: 12, SEQ ID NO: 13, SEQ ID NO: 14, SEQ ID NO: 15, SEQ ID NO: 16, SEQ ID NO: 17, SEQ ID NO: 18, SEQ ID NO: 19, SEQ ID NO: 20, SEQ ID NO: 21, SEQ ID NO: 22, and SEQ ID NO: 23.

[0108] In some aspects, the invention provides a method for altering a target B2M polynucleotide sequence in a cell comprising contacting the B2M polynucleotide sequence with a clustered regularly interspaced short palindromic repeats-associated (Cas) protein and from one to two ribonucleic acids, wherein the ribonucleic acids direct Cas protein to and hybridize to a target motif of the target B2M polynucleotide sequence, wherein the target B2M polynucleotide sequence is cleaved, and wherein at least one of the one to two ribonucleic acids targets a sequence selected from the group consisting of SEQ ID NOs: 881-2609.

[0109] In some embodiments, each of the one to two ribonucleic acids is selected from the group consisting of SEQ ID NO: 9, SEQ ID NO: 10, SEQ ID NO: 11, SEQ ID NO: 12, SEQ ID NO: 13, SEQ ID NO: 14, SEQ ID NO: 15, SEQ ID NO: 16, SEQ ID NO: 17, SEQ ID NO: 18, SEQ ID NO: 19, SEQ ID NO: 20, SEQ ID NO: 21, SEQ ID NO: 22, and SEQ ID NO: 23.

[0110] In some embodiments, each of the one to two ribonucleic acids targets a sequence selected from the group consisting of SEQ ID NOs: 881-2609.

[0111] In some aspects, the invention provides a method for altering a target B2M polynucleotide sequence in a cell comprising contacting the B2M polynucleotide sequence with a clustered regularly interspaced short palindromic repeats-associated (Cas) protein and one ribonucleic acid, wherein the ribonucleic acid directs Cas protein to and hybridizes to a target motif of the target B2M polynucleotide sequence, wherein the target B2M polynucleotide sequence is cleaved, and the ribonucleic acid targets a sequence selected from the group consisting of SEQ ID NOs: 419-880.

[0112] In some aspects, the invention provides a method for treating or preventing a disorder associated with expression of a polynucleotide sequence in a subject, the method comprising: (a) altering a target polynucleotide sequence associated with the disorder in a cell ex vivo by contacting the polynucleotide sequence with a clustered regularly interspaced short palindromic repeats-associated (Cas) protein and from one to two ribonucleic acids, wherein the ribonucleic acids direct Cas protein to and hybridize to a target motif of the target polynucleotide sequence associated with the disorder, wherein the target polynucleotide sequence associated with the disorder is cleaved; (b) altering a target B2M polynucleotide sequence in the cell ex vivo by contacting the target B2M polynucleotide sequence with a clustered regularly interspaced short palindromic repeats-associated (Cas) protein and two ribonucleic acids targeting a sequence selected from the group consisting of SEQ ID NO: 9, SEQ ID NO: 10, SEQ ID NO: 11, SEQ ID NO: 12, SEQ ID NO: 13, SEQ ID NO: 14, SEQ ID NO: 15, SEQ ID NO: 16, SEQ ID NO: 17, SEQ ID NO: 18, SEQ ID NO: 19, SEQ ID NO: 20, SEQ ID NO: 21, SEQ ID NO: 22, and SEQ ID NO: 23; and (c) introducing the cell into the subject, thereby treating or preventing a disorder associated with expression of the polynucleotide sequence. In some aspects, the two ribonucleic acids targets a sequence selected from the group consisting of SEQ ID NOs: 881-2609.

[0113] In some embodiments, the target polynucleotide sequence is CCR5 (Gene ID: 1234, also known as CC-CKR-5, CCCKR5, CCR-5, CD195, CKR-5, CKR5, CMKBR5, and IDDM22). In some embodiments, the target polynucleotide sequence is a variant of CCR5. In some embodiments, the target polynucleotide sequence is a homolog of CCR5. In some embodiments, the target polynucleotide sequence is an ortholog of CCR5. In some embodiments, the primary cell or population of primary cells comprises a genome in which the CCR5 gene has been edited to eliminate CCR5 surface expression.

[0114] In some embodiments, the target polynucleotide sequence is CXCR4 (Gene ID: 7852, also known as FB22; HM89; LAP3; LCR1; NPYR; WHIM; CD184; LESTR; NPY3R; NPYRL; HSY3RR; NPYY3R; and D2S201E). In some embodiments, the target polynucleotide sequence is a variant of CXCR4. In some embodiments, the target polynucleotide sequence is a homolog of CXCR4. In some embodiments, the target polynucleotide sequence is an ortholog of CXCR4. In some embodiments, the primary cell or population of primary cells comprises a genome in which the CXCR4 gene has been edited to eliminate CCR5 surface expression.

[0115] In some aspects, the invention provides a method for treating or preventing a disorder associated with expression of a polynucleotide sequence in a subject, the method comprising: (a) altering a target polynucleotide sequence associated with the disorder in a cell ex vivo by contacting the polynucleotide sequence with a clustered regularly interspaced short palindromic repeats-associated (Cas) protein and at least one ribonucleic acid, wherein the at least one ribonucleic acid directs Cas protein to and hybridizes to a target motif of the target polynucleotide sequence associated with the disorder, wherein the target polynucleotide sequence associated with the disorder is cleaved; (b) altering a target B2M polynucleotide sequence in the cell ex vivo by contacting the target B2M polynucleotide sequence with a clustered regularly interspaced short palindromic repeats-associated (Cas) protein and one ribonucleic acid selected from the group consisting of SEQ ID NOS: 419-880; and (c) introducing the cell into the subject, thereby treating or preventing a disorder associated with expression of the polynucleotide sequence.

[0116] In some embodiments, the target polynucleotide sequence is CCR5. In some embodiments, the target polynucleotide sequence is a variant of CCR5. In some embodiments, the target polynucleotide sequence is a homolog of CCR5. In some embodiments, the target polynucleotide sequence is an ortholog of CCR5. In some embodiments, the primary cell or population of primary cells comprises a genome in which the CCR5 gene has been edited to eliminate CCR5 surface expression.

[0117] In some embodiments, the target polynucleotide sequence is CXCR4. In some embodiments, the target polynucleotide sequence is a variant of CXCR4. In some embodiments, the target polynucleotide sequence is a homolog of CXCR4. In some embodiments, the target polynucleotide sequence is an ortholog of CXCR4. In some embodiments, the primary cell or population of primary cells comprises a genome in which the CXCR4 gene has been edited to eliminate CXCR4 surface expression.

[0118] It should be appreciated that the CRISPR/Cas systems of the present invention can cleave target polynucleotide sequences in a variety of ways. In some embodiments, the target polynucleotide sequence is cleaved such that a double-strand break results. In some embodiments, the target polynucleotide sequence is cleaved such that a single-strand break results.

[0119] The methods of the present invention can be used to alter any target polynucleotide sequence in a cell, as long as the target polynucleotide sequence in the cell contains a suitable target motif that allows at least one ribonucleic acid of the CRISPR/Cas system to direct the Cas protein to and hybridize to the target motif. Those skilled in the art will appreciate that the target motif for targeting a particular polynucleotide depends on the CRISPR/Cas system being used, and the sequence of the polynucleotide to be targeted.

[0120] In some embodiments, the target motif is 17 to 23 bp in length. In some embodiments, the target motif is at least 20 bp in length. In some embodiments, the target motif is a 20-nucleotide DNA sequence. In some embodiments, the target motif is a 20-nucleotide DNA sequence beginning with G and immediately precedes an NGG motif recognized by the Cas protein. In some embodiments, the target motif is G(N)₁₉NGG. In some embodiments, the target motif is a 20-nucleotide DNA sequence and immediately precedes an NGG motif recognized by the Cas protein. In some embodiments, the target motif is (N)₂₀NGG.

[0121] In some embodiments, the target motif is 17 to 23 bp in length. In some embodiments, the target motif is at least 20 bp in length. In some embodiments, the target motif is a 20-nucleotide DNA sequence. In some embodiments, the target motif is a 20-nucleotide DNA sequence having a 5′ T-rich region (e.g. TTTN motif).

[0122] The target motifs of the present invention can be selected to minimize off-target effects of the CRISPR/Cas systems of the present invention. In some embodiments, the target motif is selected such that it contains at least two mismatches when compared with all other genomic nucleotide sequences in the cell. In some embodiments, the target motif is selected such that it contains at least one mismatch when compared with all other genomic nucleotide sequences in the cell. Those skilled in the art will appreciate that a variety of techniques can be used to select suitable target motifs for minimizing off-target effects (e.g., bioinformatics analyses).

[0123] In some embodiments, the target motif comprises a G(N)₁₉NGG or (N)₂₀NGG DNA sequence in the B2M gene. In some embodiments, the target motif comprises a G(N)₁₉NGG or (N)₂₀NGG DNA sequence in SEQ ID NO: 1. In some embodiments, the target motif comprises a DNA sequence selected from the group consisting of SEQ ID NOs: 16 and 21.

[0124] In some embodiments, the target motif comprises a DNA sequence comprising at least one nucleotide mismatch compared to a G(N)₁₉NGG or (N)₂₀NGG DNA sequence in the B2M gene. In some embodiments, the target motif comprises a DNA sequence comprising at least one nucleotide mismatch compared to a G(N)₁₉NGG or (N)₂₀NGG DNA sequence in SEQ ID NO: 1. In some embodiments, the target motif comprises a DNA sequence comprising at least one nucleotide mismatch compared to a DNA sequence selected from the group consisting of SEQ ID NOs: 16 and 21.

[0125] In some embodiments, the target motif comprises a DNA sequence comprising at least two nucleotide mismatches compared to a G(N)₁₉NGG or (N)₂₀NGG DNA sequence in the B2M gene. In some embodiments, the target motif comprises a DNA sequence comprising at least two nucleotide mismatches compared to a G(N)₁₉NGG or (N)₂₀NGG DNA sequence in SEQ ID NO: 1.

[0126] In some embodiments, the target motif comprises a DNA sequence comprising at least two nucleotide mismatches compared to a DNA sequence selected from the group consisting of SEQ ID NOs: 16 and 21.

[0127] In some embodiments, the CRISPR/Cas systems of the present invention utilize homology-directed repair to correct target polynucleotide sequences. In some embodiments, subsequent to cleavage of the target polynucleotide sequence, homology-directed repair occurs. In some embodiments, homology-directed repair is performed using an exogenously introduced DNA repair template. The exogenously introduced DNA repair template can be single-stranded or double-stranded. The DNA repair template can be of any length. Those skilled in the art will appreciate that the length of any particular DNA repair template will depend on the target polynucleotide sequence that is to be corrected. The DNA repair template can be designed to repair or replace any target polynucleotide sequence, particularly target polynucleotide sequences comprising disease associated polymorphisms (e.g., SNPs). For example, homology-directed repair of a mutant allele comprising such SNPs can be achieved with a CRISPR/Cas system by selecting two target motifs which flank the mutant allele, and an designing a DNA repair template to match the wild-type allele.

[0128] In some embodiments, a CRISPR/Cas system of the present invention includes a Cas protein and at least one to two ribonucleic acids that are capable of directing the Cas protein to and hybridizing to a target motif of a target polynucleotide sequence. As used herein, “protein” and “polypeptide” are used interchangeably to refer to a series of amino acid residues joined by peptide bonds (i.e., a polymer of amino acids) and include modified amino acids (e.g., phosphorylated, glycated, glycosolated, etc.) and amino acid analogs. Exemplary polypeptides or proteins include gene products, naturally occurring proteins, homologs, paralogs, fragments and other equivalents, variants, and analogs of the above.

[0129] In some embodiments, a Cas protein comprises one or more amino acid substitutions or modifications. In some embodiments, the one or more amino acid substitutions comprises a conservative amino acid substitution. In some instances, substitutions and/or modifications can prevent or reduce proteolytic degradation and/or extend the half-life of the polypeptide in a cell. In some embodiments, the Cas protein can comprise a peptide bond replacement (e.g., urea, thiourea, carbamate, sulfonyl urea, etc.). In some embodiments, the Cas protein can comprise a naturally occurring amino acid. In some embodiments, the Cas protein can comprise an alternative amino acid (e.g., D-amino acids, beta-amino acids, homocysteine, phosphoserine, etc.). In some embodiments, a Cas protein can comprise a modification to include a moiety (e.g., PEGylation, glycosylation, lipidation, acetylation, end-capping, etc.).

[0130] In some embodiments, a Cas protein comprises a core Cas protein. Exemplary Cas core proteins include, but are not limited to Cas1, Cas2, Cas3, Cas4, Cas5, Cas6, Cas7, Cas8 and Cas9. In some embodiments, a Cas protein comprises a Cas protein of an E. coli subtype (also known as CASS2). Exemplary Cas proteins of the E. Coli subtype include, but are not limited to Cse1, Cse2, Cse3, Cse4, and Cas5e. In some embodiments, a Cas protein comprises a Cas protein of the Ypest subtype (also known as CASS3). Exemplary Cas proteins of the Ypest subtype include, but are not limited to Csy1, Csy2, Csy3, and Csy4. In some embodiments, a Cas protein comprises a Cas protein of the Nmeni subtype (also known as CASS4). Exemplary Cas proteins of the Nmeni subtype include, but are not limited to Csn1 and Csn2. In some embodiments, a Cas protein comprises a Cas protein of the Dvulg subtype (also known as CASS1). Exemplary Cas proteins of the Dvulg subtype include Csd1, Csd2, and Cas5d. In some embodiments, a Cas protein comprises a Cas protein of the Tneap subtype (also known as CASS7). Exemplary Cas proteins of the Tneap subtype include, but are not limited to, Cst1, Cst2, Cas5t. In some embodiments, a Cas protein comprises a Cas protein of the Hmari subtype. Exemplary Cas proteins of the Hmari subtype include, but are not limited to Csh1, Csh2, and Cas5h. In some embodiments, a Cas protein comprises a Cas protein of the Apern subtype (also known as CASS5). Exemplary Cas proteins of the Apern subtype include, but are not limited to Csa1, Csa2, Csa3, Csa4, Csa5, and Cas5a. In some embodiments, a Cas protein comprises a Cas protein of the Mtube subtype (also known as CASS6). Exemplary Cas proteins of the Mtube subtype include, but are not limited to Csm1, Csm2, Csm3, Csm4, and Csm5. In some embodiments, a Cas protein comprises a RAMP module Cas protein. Exemplary RAMP module Cas proteins include, but are not limited to, Cmr1, Cmr2, Cmr3, Cmr4, Cmr5, and Cmr6.

[0131] In some embodiments, the Cas protein is a Streptococcus pyogenes Cas9 protein or a functional portion thereof. In some embodiments, the Cas protein is Cas9 protein from any bacterial species or functional portion thereof. Cas9 protein is a member of the type II CRISPR systems which typically include a trans-coded small RNA (tracrRNA), endogenous ribonuclease 3 (rnc) and a Cas protein. Cas 9 protein (also known as CRISPR-associated endonuclease Cas9/Csn1) is a polypeptide comprising 1368 amino acids. An exemplary amino acid sequence of a Cas9 protein (SEQ ID NO: 298) is shown in FIG. 4. Cas 9 contains 2 endonuclease domains, including an RuvC-like domain (residues 7-22, 759-766 and 982-989) which cleaves target DNA that is noncomplementary to crRNA, and an HNH nuclease domain (residues 810-872) which cleave target DNA complementary to crRNA. In FIG. 4, the RuvC-like domain is highlighted in yellow and the HNH nuclease domain is underlined.

[0132] In some embodiments, the Cas protein is Cpf1 protein or a functional portion thereof. In some embodiments, the Cas protein is Cpf1 from any bacterial species or functional portion thereof. In some aspects, Cpf1 is a Francisella novicida U112 protein or a functional portion thereof. In some aspects, Cpf1 is a Acidaminococcus sp. BV3L6 protein or a functional portion thereof. In some aspects, Cpf1 is a Lachnospiraceae bacterium ND2006 protein or a function portion thereof. Cpf1 protein is a member of the type V CRISPR systems. Cpf1 protein is a polypeptide comprising about 1300 amino acids. Cpf1 contains a RuvC-like endonuclease domain. Cpf1 cleaves target DNA in a staggered pattern using a single ribonuclease domain. The staggered DNA double-stranded break results in a 4 or 5-nt 5′ overhang.

[0133] As used herein, “functional portion” refers to a portion of a peptide which retains its ability to complex with at least one ribonucleic acid (e.g., guide RNA (gRNA)) and cleave a target polynucleotide sequence. In some embodiments, the functional portion comprises a combination of operably linked Cas9 protein functional domains selected from the group consisting of a DNA binding domain, at least one RNA binding domain, a helicase domain, and an endonuclease domain. In some embodiments, the functional portion comprises a combination of operably linked Cpf1 protein functional domains selected from the group consisting of a DNA binding domain, at least one RNA binding domain, a helicase domain, and an endonuclease domain. In some embodiments, the functional domains form a complex. In some embodiments, a functional portion of the Cas9 protein comprises a functional portion of a RuvC-like domain. In some embodiments, a functional portion of the Cas9 protein comprises a functional portion of the HNH nuclease domain. In some embodiments, a functional portion of the Cpf1 protein comprises a functional portion of a RuvC-like domain.

[0134] It should be appreciated that the present invention contemplates various of ways of contacting a target polynucleotide sequence with a Cas protein (e.g., Cas9). In some embodiments, exogenous Cas protein can be introduced into the cell in polypeptide form. In certain embodiments, Cas proteins can be conjugated to or fused to a cell-penetrating polypeptide or cell-penetrating peptide. As used herein, “cell-penetrating polypeptide” and “cell-penetrating peptide” refers to a polypeptide or peptide, respectively, which facilitates the uptake of molecule into a cell. The cell-penetrating polypeptides can contain a detectable label.

[0135] In certain embodiments, Cas proteins can be conjugated to or fused to a charged protein (e.g., that carries a positive, negative or overall neutral electric charge). Such linkage may be covalent. In some embodiments, the Cas protein can be fused to a superpositively charged GFP to significantly increase the ability of the Cas protein to penetrate a cell (Cronican et al. ACS Chem Biol.2010;5(8):747-52). In certain embodiments, the Cas protein can be fused to a protein transduction domain (PTD) to facilitate its entry into a cell. Exemplary PTDs include Tat, oligoarginine, and penetratin. In some embodiments, the Cas9 protein comprises a Cas9 polypeptide fused to a cell-penetrating peptide. In some embodiments, the Cas9 protein comprises a Cas9 polypeptide fused to a PTD. In some embodiments, the Cas9 protein comprises a Cas9 polypeptide fused to a tat domain. In some embodiments, the Cas9 protein comprises a Cas9 polypeptide fused to an oligoarginine domain. In some embodiments, the Cas9 protein comprises a Cas9 polypeptide fused to a penetratin domain. In some embodiments, the Cas9 protein comprises a Cas9 polypeptide fused to a superpositively charged GFP. In some embodiments, the Cpf1 protein comprises a Cpf1 polypeptide fused to a cell-penetrating peptide. In some embodiments, the Cpf1 protein comprises a Cpf1 polypeptide fused to a PTD. In some embodiments, the Cpf1 protein comprises a Cpf1 polypeptide fused to a tat domain. In some embodiments, the Cpf1 protein comprises a Cpf1 polypeptide fused to an oligoarginine domain. In some embodiments, the Cpf1 protein comprises a Cpf1 polypeptide fused to a penetratin domain. In some embodiments, the Cpf1 protein comprises a Cpf1 polypeptide fused to a superpositively charged GFP.

[0136] In some embodiments, the Cas protein can be introduced into a cell containing the target polynucleotide sequence in the form of a nucleic acid encoding the Cas protein (e.g., Cas9 or Cpf1). The process of introducing the nucleic acids into cells can be achieved by any suitable technique. Suitable techniques include calcium phosphate or lipid-mediated transfection, electroporation, and transduction or infection using a viral vector. In some embodiments, the nucleic acid comprises DNA. In some embodiments, the nucleic acid comprises a modified DNA, as described herein. In some embodiments, the nucleic acid comprises mRNA. In some embodiments, the nucleic acid comprises a modified mRNA, as described herein (e.g., a synthetic, modified mRNA).

[0137] In some embodiments, the Cas protein is complexed with one to two ribonucleic acids. In some embodiments, the Cas protein is complexed with two ribonucleic acids. In some embodiments, the Cas protein is complexed with one ribonucleic acid. In some embodiments, the Cas protein is encoded by a modified nucleic acid, as described herein (e.g., a synthetic, modified mRNA).

[0138] The methods of the present invention contemplate the use of any ribonucleic acid that is capable of directing a Cas protein to and hybridizing to a target motif of a target polynucleotide sequence. In some embodiments, at least one of the ribonucleic acids comprises tracrRNA. In some embodiments, at least one of the ribonucleic acids comprises CRISPR RNA (crRNA). In some embodiments, a single ribonucleic acid comprises a guide RNA that directs the Cas protein to and hybridizes to a target motif of the target polynucleotide sequence in a cell. In some embodiments, at least one of the ribonucleic acids comprises a guide RNA that directs the Cas protein to and hybridizes to a target motif of the target polynucleotide sequence in a cell. In some embodiments, both of the one to two ribonucleic acids comprise a guide RNA that directs the Cas protein to and hybridizes to a target motif of the target polynucleotide sequence in a cell. The ribonucleic acids of the present invention can be selected to hybridize to a variety of different target motifs, depending on the particular CRISPR/Cas system employed, and the sequence of the target polynucleotide, as will be appreciated by those skilled in the art. The one to two ribonucleic acids can also be selected to minimize hybridization with nucleic acid sequences other than the target polynucleotide sequence. In some embodiments, the one to two ribonucleic acids hybridize to a target motif that contains at least two mismatches when compared with all other genomic nucleotide sequences in the cell. In some embodiments, the one to two ribonucleic acids hybridize to a target motif that contains at least one mismatch when compared with all other genomic nucleotide sequences in the cell. In some embodiments, the one to two ribonucleic acids are designed to hybridize to a target motif immediately adjacent to a deoxyribonucleic acid motif recognized by the Cas protein. In some embodiments, each of the one to two ribonucleic acids are designed to hybridize to target motifs immediately adjacent to deoxyribonucleic acid motifs recognized by the Cas protein which flank a mutant allele located between the target motifs.

[0139] In some embodiments, at least one of the one to two ribonucleic acids comprises a sequence selected from the group consisting of the ribonucleic acid sequences of FIG. 1 in WIPO Publication No. WO2014/165825. In some embodiments, at least one of the one to two ribonucleic acids comprises a sequence with a single nucleotide mismatch to a sequence selected from the group consisting of the ribonucleic acid sequences of FIG. 1 in WIPO Publication No. WO2014/165825.

[0140] In some embodiments, at least one of the one to two ribonucleic acids comprises a sequence selected from the group consisting of the ribonucleic acid sequences of FIG. 2 in WIPO Publication No. WO2014/165825. In some embodiments, at least one of the one to two ribonucleic acids comprises a sequence with a single nucleotide mismatch to a sequence selected from the group consisting of the ribonucleic acid sequences of FIG. 2 in WIPO Publication No. WO2014/165825.

[0141] In some embodiments, each of the one to two ribonucleic acids comprises guide RNAs that directs the Cas protein to and hybridizes to a target motif of the target polynucleotide sequence in a cell.

[0142] In some embodiments, one or two ribonucleic acids (e.g., guide RNAs) are complementary to and/or hybridize to sequences on the same strand of a target polynucleotide sequence. In some embodiments, one or two ribonucleic acids (e.g., guide RNAs) are complementary to and/or hybridize to sequences on the opposite strands of a target polynucleotide sequence. In some embodiments, the one or two ribonucleic acids (e.g., guide RNAs) are not complementary to and/or do not hybridize to sequences on the opposite strands of a target polynucleotide sequence. In some embodiments, the one or two ribonucleic acids (e.g., guide RNAs) are complementary to and/or hybridize to overlapping target motifs of a target polynucleotide sequence. In some embodiments, the one or two ribonucleic acids (e.g., guide RNAs) are complementary to and/or hybridize to offset target motifs of a target polynucleotide sequence.

[0143] The present invention also contemplates multiplex genomic editing. Those skilled in the art will appreciate that the description above with respect to genomic editing of a single gene is equally applicable to the multiplex genomic editing embodiments described below.

[0144] As used herein, the terms “administering,” “introducing” and “transplanting” are used interchangeably in the context of the placement of cells, e.g. cells described herein comprising a target polynucleotide sequence altered according to the methods of the invention into a subject, by a method or route which results in at least partial localization of the introduced cells at a desired site. The cells can be implanted directly to the desired site, or alternatively be administered by any appropriate route which results in delivery to a desired location in the subject where at least a portion of the implanted cells or components of the cells remain viable. The period of viability of the cells after administration to a subject can be as short as a few hours, e. g. twenty-four hours, to a few days, to as long as several years. In some instances, the cells can also be administered a location other than the desired site, such as in the liver or subcutaneously, for example, in a capsule to maintain the implanted cells at the implant location and avoid migration of the implanted cells.

[0145] For ex vivo methods, cells can include autologous cells, i.e., a cell or cells taken from a subject who is in need of altering a target polynucleotide sequence in the cell or cells (i.e., the donor and recipient are the same individual). Autologous cells have the advantage of avoiding any immunologically-based rejection of the cells. Alternatively, the cells can be heterologous, e.g., taken from a donor. The second subject can be of the same or different species. Typically, when the cells come from a donor, they will be from a donor who is sufficiently immunologically compatible with the recipient, i.e., will not be subject to transplant rejection, to lessen or remove the need for immunosuppression. In some embodiments, the cells are taken from a xenogeneic source, i.e., a non-human mammal that has been genetically engineered to be sufficiently immunologically compatible with the recipient, or the recipient's species. Methods for determining immunological compatibility are known in the art, and include tissue typing to assess donor-recipient compatibility for HLA and ABO determinants. See, e.g., Transplantation Immunology, Bach and Auchincloss, Eds. (Wiley, John & Sons, Incorporated 1994).

[0146] Any suitable cell culture media can be used for ex vivo methods of the invention.

[0147] The terms “subject” and “individual” are used interchangeably herein, and refer to an animal, for example, a human from whom cells can be obtained and/or to whom treatment, including prophylactic treatment, with the cells as described herein, is provided. For treatment of those infections, conditions or disease states which are specific for a specific animal such as a human subject, the term subject refers to that specific animal. The “non-human animals” and “non-human mammals” as used interchangeably herein, includes mammals such as rats, mice, rabbits, sheep, cats, dogs, cows, pigs, and non-human primates. The term “subject” also encompasses any vertebrate including but not limited to mammals, reptiles, amphibians and fish. However, advantageously, the subject is a mammal such as a human, or other mammals such as a domesticated mammal, e.g. dog, cat, horse, and the like, or production mammal, e.g. cow, sheep, pig, and the like.

[0148] In some embodiments, the alteration results in reduced expression of the target polynucleotide sequences. In some embodiments, the alteration results in a knock out of the target polynucleotide sequences. In some embodiments, the alteration results in correction of the target polynucleotide sequences from undesired sequences to desired sequences. In some embodiments, each alteration is a homozygous alteration. In some embodiments, the efficiency of alteration at each loci is from about 5% to about 80%. In some embodiments, the efficiency of alteration at each loci is from about 10% to about 80%. In some embodiments, the efficiency of alteration at each loci is from about 30% to about 80%. In some embodiments, the efficiency of alteration at each loci is from about 50% to about 80%. In some embodiments, the efficiency of alteration at each loci is from greater than or equal to about 80%.

[0149] In some embodiments, each target polynucleotide sequence is cleaved such that a double-strand break results. In some embodiments, each target polynucleotide sequence is cleaved such that a single-strand break results.

[0150] In some embodiments, the target polynucleotide sequences comprise multiple different portions of B2M. In some embodiments, the target polynucleotide sequences comprise multiple different portions of CCR5. In some embodiments, the target polynucleotide sequences comprise multiple different portions of CXCR4. In some embodiments, the target polynucleotide sequences comprise at least a portion of CCR5 and at least a portion of CXCR4.

[0151] In some embodiments, each target motif is a 17 to 23 nucleotide DNA sequence. In some embodiments, each target motif is a 20-nucleotide DNA sequence. In some embodiments, each target motif is a 20-nucleotide DNA sequence with a 5′ T-rich region. In some embodiments, each target motif is a 20-nucleotide DNA sequence beginning with G and immediately precedes an NGG motif recognized by the Cas protein. In some embodiments, each target motif is a 20-nucleotide DNA sequence and immediately precedes an NGG motif recognized by the Cas protein. In some embodiments, each target motif is G(N)19NGG. In some embodiments, each target motif is (N)20NGG. In some embodiments, each target motif is selected such that it contains at least two mismatches when compared with all other genomic nucleotide sequences in the cell. In some embodiments, each target motif is selected such that it contains at least two mismatches when compared with all other genomic nucleotide sequences in the cell.

[0152] In some embodiments, subsequent to cleavage of the target polynucleotide sequences, homology-directed repair occurs. In some embodiments, homology-directed repair is performed using an exogenously introduced DNA repair template. In some embodiments, exogenously introduced DNA repair template is single-stranded. In some embodiments, exogenously introduced DNA repair template is double-stranded.

[0153] In some embodiments, the Cas protein (e.g., Cas9 or Cpf1) is complexed with at least one ribonucleic acid. In some embodiments, the Cas protein (e.g., Cas9) is complexed with multiple ribonucleic acids. In some embodiments, the multiple ribonucleic acids are selected to minimize hybridization with nucleic acid sequences other than the target polynucleotide sequence (e.g., multiple alterations of a single target polynucleotide sequence). In some embodiments, the multiple ribonucleic acids are selected to minimize hybridization with nucleic acid sequences other than the target polynucleotide sequences (e.g., one or more alterations of multiple target polynucleotide sequences). In some embodiments, each of the multiple ribonucleic acids hybridize to target motifs that contain at least two mismatches when compared with all other genomic nucleotide sequences in the cell. In some embodiments, each of the multiple ribonucleic acids hybridize to target motifs that contain at least one mismatch when compared with all other genomic nucleotide sequences in the cell. In some embodiments, each of the multiple ribonucleic acids are designed to hybridize to target motifs immediately adjacent to deoxyribonucleic acid motifs recognized by the Cas protein. In some embodiments, each of the multiple ribonucleic acids are designed to hybridize to target motifs immediately adjacent to deoxyribonucleic acid motifs recognized by the Cas protein which flank mutant alleles located between the target motifs.

[0154] In some embodiments, the Cas protein (e.g., Cpf1) is complexed with a single ribonucleic acid. In some embodiments, the ribonucleic acid is selected to minimize hybridization with a nucleic acid sequence other than the target polynucleotide sequence (e.g., multiple alterations of a single target polynucleotide sequence). In some embodiments, the ribonucleic acid is selected to minimize hybridization with a nucleic acid sequence other than the target polynucleotide sequences (e.g., one or more alterations of multiple target polynucleotide sequences). In some embodiments, the ribonucleic acid hybridizes to target motifs that contain at least two mismatches when compared with all other genomic nucleotide sequences in the cell. In some embodiments, the ribonucleic acid hybridizes to target motifs that contain at least one mismatch when compared with all other genomic nucleotide sequences in the cell. In some embodiments, the ribonucleic acid is designed to hybridize to target motifs immediately adjacent to deoxyribonucleic acid motifs recognized by the Cas protein. In some embodiments, the ribonucleic acid is designed to hybridize to target motifs immediately adjacent to deoxyribonucleic acid motifs recognized by the Cas protein which flank mutant alleles located between the target motifs.

[0155] It should be appreciated that any of the Cas protein or the ribonucleic acids can be expressed from a plasmid. In some embodiments, any of the Cas protein or the ribonucleic acids are expressed using a promoter optimized for increased expression in stem cells (e.g., human stem and/or progenitor cells). In some embodiments, the promoter is selected from the group consisting of a Cytomegalovirus (CMV) early enhancer element and a chicken beta-actin promoter, a chicken beta-actin promoter, an elongation factor-1 alpha promoter, and a ubiquitin promoter.

[0156] In some embodiments, the methods of the present invention further comprise selecting cells that express the Cas protein. The present invention contemplates any suitable method for selecting cells. In some embodiments, selecting cells comprises FACS. In some embodiments, FACS is used to select cells which co-express Cas and a fluorescent protein selected from the group consisting of green fluorescent protein and red fluorescent protein.

[0157] The present invention contemplates treating and/or preventing a variety of disorders which are associated with expression of a target polynucleotide sequences. It should be appreciated that the methods and compositions described herein can be used to treat or prevent disorders associated with increased expression of a target polynucleotide sequence, as well as decreased expression of a target polynucleotide sequence in a cell. Increased and decreased expression of a target polynucleotide sequence includes circumstances where the expression levels of the target polynucleotide sequence are increased or decreased, respectively, as well as circumstances in which the function and/or level of activity of an expression product of the target polynucleotide sequence increases or decreases, respectively, compared to normal expression and/or activity levels. Those skilled in the art will appreciate that treating or preventing a disorder associated with increased expression of a target polynucleotide sequence can be assessed by determining whether the levels and/or activity of the target polynucleotide sequence (or an expression product thereof) are decreased in a relevant cell after contacting a cell with a composition described herein. The skilled artisan will also appreciate that treating or preventing a disorder associated with decreased expression of a target polynucleotide sequence can be assessed by determining whether the levels and/or activity of the target polynucleotide sequence (or an expression product thereof) are increased in the relevant cell after contacting a cell with a composition described herein.

[0158] In some embodiments, the disorder is a genetic disorder. In some embodiments, the disorder is a monogenic disorder. In some embodiments, the disorder is a multigenic disorder. In some embodiments, the disorder is a disorder associated with one or more SNPs. Exemplary disorders associated with one or more SNPs include a complex disease described in U.S. Pat. No. 7,627,436, Alzheimer's disease as described in PCT International Application Publication No. WO/2009/112882, inflammatory diseases as described in U.S. Patent Application Publication No. 2011/0039918, polycystic ovary syndrome as described in U.S. Patent Application Publication No. 2012/0309642, cardiovascular disease as described in U.S. Pat. No. 7,732,139, Huntington's disease as described in U.S. Patent Application Publication No. 2012/0136039, thromboembolic disease as described in European Patent Application Publication No. EP2535424, neurovascular diseases as described in PCT International Application Publication No. WO/2012/001613, psychosis as described in U.S. Patent Application Publication No. 2010/0292211, multiple sclerosis as described in U.S. Patent Application Publication No. 2011/0319288, schizophrenia, schizoaffective disorder, and bipolar disorder as described in PCT International Application Publication No. WO/2006/023719A2, bipolar disorder and other ailments as described in U.S. Patent Application Publication No. U.S. 2011/0104674, colorectal cancer as described in PCT International Application Publication No. WO/2006/104370A1, a disorder associated with a SNP adjacent to the AKT1 gene locus as described in U.S. Patent Application Publication No. U.S. 2006/0204969, an eating disorder as described in PCT International Application Publication No. WO/2003/012143A1, autoimmune disease as described in U.S. Patent Application Publication No. U.S. 2007/0269827, fibrostenosing disease in patients with Crohn's disease as described in U.S. Pat. No. 7,790,370, and Parkinson's disease as described in U.S. Pat. No. 8,187,811, each of which is incorporated herein by reference in its entirety. Other disorders associated with one or more SNPs which can be treated or prevented according to the methods of the present invention will be apparent to the skilled artisan.

[0159] In some embodiments, the disorder is human immunodeficiency virus (HIV) infection. In some embodiments, the disorder is acquired immunodeficiency syndrome (AIDS).

[0160] The methods of the present invention are capable of altering target polynucleotide sequences in a variety of different cells (e.g., altering B2M to ablate MHC class I surface expression and altering one or more additional target polynucleotide sequences associated with a disorder in which altering the target polynucleotide sequences would be beneficial). In some embodiments, the methods of the present invention are used to alter target polynucleotide sequences in cells ex vivo for subsequent introduction into a subject. In some embodiments, the cell is a peripheral blood cell. In some embodiments, the cell is a stem cell or a pluripotent cell. In some embodiments, the cell is a hematopoietic stem cell. In some embodiments, the cell is a CD34+ cell. In some embodiments, the cell is a CD34+ mobilized peripheral blood cell. In some embodiments, the cell is a CD34+ cord blood cell. In some embodiments, the cell is a CD34+ bone marrow cell. In some embodiments, the cell is a CD34+CD38-Lineage-CD90+CD45RA− cell. In some embodiments, the cell is a CD4+ cell. In some embodiments, the cell is a CD4+ T cell. In some embodiments, the cell is a hepatocyte. In some embodiments, the cell is a human pluripotent cell. In some embodiments, the cell is a primary human cell. In some embodiments, the cell is a primary CD34+ cell. In some embodiments, the cell is a primary CD34+ hematopoietic progenitor cell (HPC). In some embodiments, the cell is a primary CD4+ cell. In some embodiments, the cell is a primary CD4+ T cell. In some embodiments, the cell is an autologous primary cell. In some embodiments, the cell is an autologous primary somatic cell. In some embodiments, the cell is an allogeneic primary cell. In some embodiments, the cell is an allogeneic primary somatic cell. In some embodiments, the cell is a nucleated cell. In some embodiments, the cell is a non-transformed cell. In some embodiments, the cell is a human choriocarcinoma cell. In some embodiments, the cell is a JEG-3 cell. In some embodiments, the cell is a monocyte cell. In some embodiments, the cell is a Thp-1 cell. In some embodiments, the cell is not a cancer cell. In some embodiments, the cell is not a tumor cell. In some embodiments, the cell is not a transformed cell.

[0161] The present invention also provides compositions comprising Cas proteins of the present invention or functional portions thereof, nucleic acids encoding the Cas proteins or functional portions thereof, and ribonucleic acid sequences which direct Cas proteins to and hybridize to target motifs of target polynucleotides in a cell. In some aspects, disclosed herein are compositions comprising a nucleic acid sequence encoding a Cas 9 protein, a first ribonucleic acid targeting a sequence of SEQ ID NO: 16; and a second ribonucleic acid targeting a sequence of SEQ ID NO: 21. In some aspects, disclosed herein are compositions comprising a chimeric nucleic acid comprising a nucleic acid sequence encoding a Cas protein; a first ribonucleic acid targeting a sequence of SEQ ID NO: 16; and a second ribonucleic acid targeting a sequence of SEQ ID NO:21. In some aspects, disclosed herein are compositions comprising a nucleic acid sequence encoding a Cpf1 protein and a ribonucleic acid targeting a sequence selected from the group consisting of SEQ ID NOs: 419-880. In some aspects, disclosed herein are compositions comprising a chimeric nucleic acid comprising a nucleic acid sequence encoding a Cas protein and a ribonucleic acid targeting a sequence selected from the group consisting of SEQ ID NOs: 419-880.

[0162] In some embodiments, the composition comprises a nucleic acid sequence encoding a detectable marker.

[0163] In some embodiments, the first ribonucleic acid comprises a sequence with a single nucleotide mismatch to a sequence selected from the group consisting of SEQ ID NOs: 9-23 and 881-2609. In some embodiments, the first ribonucleic acid comprises a sequence with a two nucleotide mismatch to a sequence selected from the group consisting of SEQ ID NOs: 9-23 and 881-2609.

[0164] In some embodiments, the second ribonucleic acid comprises a sequence with a single nucleotide mismatch to a sequence selected from the group consisting of SEQ ID NOs: 9-23 and 881-2609. In some embodiments, the second ribonucleic acid comprises a sequence with a two nucleotide mismatch to a sequence selected from the group consisting of SEQ ID NOs: 9-23 and 881-2609.

[0165] In some embodiments, a ribonucleic acid comprises a sequence with a single nucleotide mismatch to a sequence selected from the group consisting of SEQ ID NOs: 419-880. In some embodiments, the ribonucleic acid comprises a sequence with a two nucleotide mismatch to a sequence selected from the group consisting of SEQ ID NOs: 419-880.

[0166] In some embodiments, the composition includes at least one additional ribonucleic acid sequences for altering a target polynucleotide sequence. In some embodiments, the composition includes at least two additional ribonucleic acid sequences for altering a target polynucleotide sequence. In some embodiments, the composition includes at least three additional ribonucleic acid sequences for altering a target polynucleotide sequence. In some embodiments, the composition includes at least four additional ribonucleic acid sequences for altering a target polynucleotide sequence.

[0167] In some embodiments, the composition includes at least one to two additional ribonucleic acid sequences for altering a target CCR5 polynucleotide sequence. In some embodiments, the at least one to two additional ribonucleic acid sequences is a ribonucleic acid sequence for altering a target CCR5 polynucleotide selected from the group consisting of any two ribonucleic acid sequences of SEQ ID NOs: 2-8. In some embodiments, the at least one to two additional ribonucleic acid sequences is a ribonucleic acid sequence for altering a target CCR5 polynucleotide selected from the group consisting of any two ribonucleic acid sequences disclosed in FIG. 1 of WIPO Publication No. WO2014/165825, incorporated herein by reference in its entirety. In some embodiments, the composition includes at least one to two additional ribonucleic acid sequences for altering a target CCR5 polynucleotide having a sequence with a single nucleotide mismatch to a sequence selected from the ribonucleic acid sequences of FIG. 1 in WIPO Publication No. WO2014/165825. In some embodiments, the composition includes at least one to two additional ribonucleic acid sequences for altering a target CCR5 polynucleotide having a sequence with a two nucleotide mismatches to a sequence selected from the ribonucleic acid sequences of FIG. 1 in WIPO Publication No. WO2014/165825.

[0168] In some embodiments, the composition includes at least one to two additional ribonucleic acid sequences for altering a target CXCR4 polynucleotide sequence. In some embodiments, the at least one to two additional ribonucleic acid sequences is a ribonucleic acid sequence for altering a target CXCR4 polynucleotide selected from the group consisting of any one to two ribonucleic acid sequences disclosed in FIG. 2 of WIPO Publication No. WO2014/165825, incorporated herein by reference in its entirety. In some embodiments, the composition includes at least one to two additional ribonucleic acid sequences for altering a target CXCR4 polynucleotide having a sequence with a single nucleotide mismatch to a sequence selected from the ribonucleic acid sequences of FIG. 2 in WIPO Publication No. WO2014/165825. In some embodiments, the composition includes at least one to two additional ribonucleic acid sequences for altering a target CXCR4 polynucleotide having a sequence with a two nucleotide mismatches to a sequence selected from the ribonucleic acid sequences of FIG. 2 in WIPO Publication No. WO2014/165825.

[0169] In some embodiments, at least one of the ribonucleic acids in the composition is a modified ribonucleic acid as described herein (e.g., a synthetic, modified ribonucleic acid, e.g., comprising one to two modified nucleotides selected from the group consisting of pseudouridine, 5-methylcytodine, 2-thio-uridine, 5-methyluridine-5′-triphosphate, 4-thiouridine-5′-triphosphate, 5,6-dihydrouridine-5′-triphosphate, and 5-azauridine-5′-triphosphate, or any other modified nucleotides or modifications described herein).

[0170] In some embodiments, a composition of the present invention comprises a nucleic acid sequence encoding a Cas protein. In some embodiments, a composition of the present invention comprises nucleic acid sequence encoding Cas9 protein or a functional portion thereof. In some embodiments, a composition of the present invention comprises nucleic acid sequence encoding Cpf1 protein or a functional portion thereof.

[0171] In some embodiments, the nucleic acid encoding the Cas protein (e.g., Cas9 or Cpf1) comprises a modified ribonucleic acid as described herein (e.g., a synthetic, modified mRNA described herein, e.g., comprising at least one modified nucleotide selected from the group consisting of pseudouridine, 5-methylcytodine, 2-thio-uridine, 5-methyluridine-5′-triphosphate, 4-thiouridine-5′-triphosphate, 5,6-dihydrouridine-5′-triphosphate, and 5-azauridine-5′-triphosphate or any other modified nucleotides or modifications described herein).

[0172] In some embodiments, a composition of the present invention comprises a nucleic acid sequence encoding a fluorescent protein selected from the group consisting of green fluorescent protein and red fluorescent protein. In some embodiments, a composition of the present invention comprises a promoter operably linked to the chimeric nucleic acid. In some embodiments, the promoter is optimized for increased expression in human cells. In some embodiments, the promoter is optimized for increased expression in human stem cells. In some embodiments, the promoter is optimized for increased expression in primary human cells. In some embodiments, the promoter is selected from the group consisting of a Cytomegalovirus (CMV) early enhancer element and a chicken beta-actin promoter, a chicken beta-actin promoter, an elongation factor-1 alpha promoter, and a ubiquitin promoter.

[0173] In some embodiments, the Cas protein comprises a Cas9 protein or a functional portion thereof. In some embodiments, the Cas protein comprises a Cpf1 protein or a functional portion thereof.

[0174] The present invention also provides kits for practicing any of the methods of the present invention, as well as kits comprising the compositions of the present invention, and instructions for using the kits for altering target polynucleotide sequences in a cell.

### Administering Cells

[0175] In some aspects, the invention provides a method of administering cells to a subject in need of such cells, the method comprising: (a) contacting a cell or population of cells ex vivo with a Cas protein and two ribonucleic acids which direct Cas protein to and hybridize to a target polynucleotide sequence encoding B2M in the cell or population of cells, wherein the target polynucleotide sequence is cleaved; and (b) administering the resulting cells from (a) to a subject in need of such cells.

[0176] In some aspects, the invention provides a method of administering cells to a subject in need of such cells, the method comprising: (a) contacting a cell or population of cells ex vivo with a Cas protein and at least one ribonucleic acid which directs Cas protein to and hybridizes to a target polynucleotide sequence encoding B2M in the cell or population of cells, wherein the target polynucleotide sequence is cleaved; and (b) administering the resulting cells from (a) to a subject in need of such cells.

[0177] In some aspects, the invention provides a method of administering cells to a subject in need of such cells, the method comprising: (a) contacting a cell or population of cells ex vivo with a Cas protein and one ribonucleic acid which directs Cas protein to and hybridizes to a target polynucleotide sequence encoding B2M in the cell or population of cells, wherein the target polynucleotide sequence is cleaved; and (b) administering the resulting cells from (a) to a subject in need of such cells.

[0178] In some aspects, the invention provides a method of administering cells to a subject in need of such cells, the method comprising: (a) contacting a cell or population of cells ex vivo with (i) a Cas protein, (ii) at least two ribonucleic acids which direct Cas protein to and hybridize to a target polynucleotide sequence encoding B2M in the cell or population of cells, and (iii) at least two additional ribonucleic acids which direct Cas protein to and hybridize to a target polynucleotide sequence in the cell or population of cells, wherein the target polynucleotide sequences are cleaved; and (b) administering the resulting cell or cells from (a) to a subject in need of such cells.

[0179] In some aspects, the invention provides a method of administering cells to a subject in need of such cells, the method comprising: (a) contacting a cell or population of cells ex vivo with (i) a Cas protein, (ii) at least one ribonucleic acid which directs Cas protein to and hybridizes to a target polynucleotide sequence encoding B2M in the cell or population of cells, and (iii) at least one additional ribonucleic acid which directs Cas protein to and hybridizes to a target polynucleotide sequence in the cell or population of cells, wherein the target polynucleotide sequences are cleaved; and (b) administering the resulting cell or cells from (a) to a subject in need of such cells.

[0180] In some aspects, the invention provides a method of administering cells to a subject in need of such cells, the method comprising: (a) contacting a cell or population of cells ex vivo with (i) a Cas protein, (ii) one ribonucleic acid which directs Cas protein to and hybridizes to a target polynucleotide sequence encoding B2M in the cell or population of cells, and (iii) one additional ribonucleic acid which directs Cas protein to and hybridizes to a target polynucleotide sequence in the cell or population of cells, wherein the target polynucleotide sequences are cleaved; and (b) administering the resulting cell or cells from (a) to a subject in need of such cells.

[0181] B2M is an accessory chain of the MHC class I proteins which is necessary for the expression of MHC class I proteins on the surface of cells. It is believed that engineering cells (e.g., mutant cells) devoid of surface MHC class I may reduce the likelihood that the engineered cells will be detected by cytotoxic T cells when the engineered cells are administered to a host. Accordingly, in some embodiments, cleavage of the target polynucleotide sequence encoding B2M in the cell or population of cells reduces the likelihood that the resulting cell or cells will trigger a host immune response when the cells are administered to the subject.

[0182] In some aspects, the invention provides a method of reducing the likelihood that cells administered to a subject will trigger a host immune response in the subject, the method comprising: (a) contacting a cell or population of cells ex vivo with a Cas protein and two ribonucleic acids which direct Cas protein to and hybridize to a target polynucleotide sequence encoding B2M in the cell or population of cells, wherein the target polynucleotide sequence encoding B2M is cleaved, thereby reducing the likelihood that cells administered to the subject will trigger a host immune response in the subject; and (b) administering the resulting cells from (a) to a subject in need of such cells.

[0183] In some aspects, the invention provides a method of reducing the likelihood that cells administered to a subject will trigger a host immune response in the subject, the method comprising: (a) contacting a cell or population of cells ex vivo with a Cas protein and at least one ribonucleic acid which directs Cas protein to and hybridizes to a target polynucleotide sequence encoding B2M in the cell or population of cells, wherein the target polynucleotide sequence encoding B2M is cleaved, thereby reducing the likelihood that cells administered to the subject will trigger a host immune response in the subject; and (b) administering the resulting cells from (a) to a subject in need of such cells.

[0184] In some aspects, the invention provides a method of reducing the likelihood that cells administered to a subject will trigger a host immune response in the subject, the method comprising: (a) contacting a cell or population of cells ex vivo with (i) a Cas protein, (ii) at least two ribonucleic acids which direct Cas protein to and hybridize to a target polynucleotide sequence encoding B2M in the cell or population of cells, wherein the target polynucleotide sequence encoding B2M in the cell or population of cells is cleaved, thereby reducing the likelihood that the cell or population of cells will trigger a host immune response in the subject, and (iii) at least two additional ribonucleic acids which direct Cas protein to and hybridize to a target polynucleotide sequence in the cell or population of cells, wherein the target polynucleotide sequence is cleaved; and (b) administering the resulting cell or cells from (a) to a subject in need of such cells.

[0185] In some aspects, the invention provides a method of reducing the likelihood that cells administered to a subject will trigger a host immune response in the subject, the method comprising: (a) contacting a cell or population of cells ex vivo with (i) a Cas protein, (ii) at least one ribonucleic acid which directs Cas protein to and hybridizes to a target polynucleotide sequence encoding B2M in the cell or population of cells, wherein the target polynucleotide sequence encoding B2M in the cell or population of cells is cleaved, thereby reducing the likelihood that the cell or population of cells will trigger a host immune response in the subject, and (iii) at least one additional ribonucleic acid which directs Cas protein to and hybridizes to a target polynucleotide sequence in the cell or population of cells, wherein the target polynucleotide sequence is cleaved; and (b) administering the resulting cell or cells from (a) to a subject in need of such cells.

[0186] It is contemplated that the methods of administering cells can be adapted for any purpose in which administering such cells is desirable. In some embodiments, the subject in need of administration of cells is suffering from a disorder. For example, the subject may be suffering from a disorder in which the particular cells are decreased in function or number, and it may be desirable to administer functional cells obtained from a healthy or normal individual in which the particular cells are functioning properly and to administer an adequate number of those healthy cells to the individual to restore the function provided by those cells (e.g., hormone producing cells which have decreased in cell number or function, immune cells which have decreased in cell number or function, etc.). In such instances, the healthy cells can be engineered to decrease the likelihood of host rejection of the healthy cells. In some embodiments, the disorder comprises a genetic disorder. In some embodiments, the disorder comprises an infection. In some embodiments, the disorder comprises HIV or AIDs. In some embodiments, the disorder comprises cancer.

[0187] In some aspects, the disclosure provides a method for allogeneic administration of cells to a subject in need of such cells. The method comprises ex vivo contacting of a population of primary cells obtained from a first subject with a Cas protein or a nucleic acid encoding a Cas protein and a pair of ribonucleic acids targeting SEQ ID NO: 16 and SEQ ID NO: 21, thereby editing the genome of at least 25% of the primary cells in the population to delete a contiguous stretch of genomic DNA comprising base pairs 5109 to 7331 (SEQ ID NO: 1) in the B2M gene on chromosome 15, wherein the genomically edited cells lack surface expression of MHC class I molecules, and then administering the genomically edited cells to a second subject in need of such cells.

[0188] In some aspects, the disclosure provides a method for allogeneic administration of cells to a subject in need of such cells. The method comprises ex vivo contacting of a population of primary cells obtained from a first subject with a Cas protein or a nucleic acid encoding a Cas protein and a ribonucleic acid targeting a sequence selected from the group of consisting of SEQ ID NOs: 419-880, thereby editing the genome of at least 25% of the primary cells in the population to delete a contiguous stretch of genomic DNA comprising base pairs 5109 to 7331 (SEQ ID NO: 1) in the B2M gene on chromosome 15, wherein the genomically edited cells lack surface expression of MHC class I molecules, and then administering the genomically edited cells to a second subject in need of such cells.

[0189] As noted above, any population of primary cells can be edited to delete SEQ ID NO: 1 using the method. Examples of such cells include, a stem cell, a pluripotent cell, a progenitor cells, a hematopoietic stem and/or progenitor cells, a CD34+ cell, a CD34+ mobilized peripheral blood cell, a CD34+ cord blood cell, a CD34+ bone marrow cell, a CD34+CD38-Lineage-CD90+CD45RA− cell, a CD34+ hematopoietic stem and/or progenitor cell, a CD4+ T cell, a hepatocyte, a somatic cell, and a non-transformed cell.

[0190] The population of cells can be sorted (e.g., using FACS) prior to administering the cells to select for cells in which their genome has been edited to comprise deletion of SEQ ID NO: 1. The sorted cells can then be expanded to an amount of cells needed for transplantation for the particular disorder for which the second subject is in need of such cells. For example, the second subject might be suffering from, being treated for, diagnosed with, at risk of developing, or suspected of having, a disorder selected from the group consisting of a genetic disorder, an infection, and cancer. In the situation in which the subject is suffering from an infection, such as HIV or AIDS, the subject might be in need of CD34+ HPSC cells. In such example, the first subject (a CD34+ HPSC cell donor) can undergo an apheresis procedure in which bone marrow HPSC cells are mobilized using an HPSC mobilization regimen (e.g., G-CSF), and then those mobilized cells are harvested via apheresis. CD34+ HPSC cells can then be sorted from the mobilized peripheral blood cells. Once a suitable number of CD34+ HSPC cells is obtained, such cells can be modified using the pair of gRNA sequences and the CRISPR/Cas systems disclosed herein to ablate MHC class I molecule surface expression in at least 25% of the population of primary CD34+ HPSC cells from the first subject. The population of cells can then be sorted to select for mutant CD34+ HPSC cells comprising deletion of SEQ ID NO: 1, and then those mutant cells can optionally be expanded for subsequent administration to a subject.

[0191] In some embodiments, the method can include, prior to the step of administering, contacting the genomically modified cells with Cas protein and one or more guide RNA sequences targeting one or more additional target polynucleotides that are associated with the disorder for which the second subject (i.e., recipient) is in need of such cells. In the HIV example above, the genomically modified cells can be contacted with Cas protein and one or more guide RNA sequences targeting the CCR5 and/or CXCR4 genes, thereby editing the genome of the genomically modified cells to eliminate or reduce surface expression of CCR5 and/or CXCR4. In this way, the mutant cells would comprise deletion of SEQ ID NO: 1 from the B2M gene and altered expression of CCR5 and/or CXCR4. Such cells would be beneficial for administration to the second subject (e.g., suffering from HIV or AIDS) as they would eliminate or reduce the likelihood of an unwanted host immune response due to lack of MHC class I molecule surface expression, and exhibit little or no susceptibility to HIV infection due to the lack of CCR5 and/or CXCR4 surface expression.

[0192] As used herein “nucleic acid,” in its broadest sense, includes any compound and/or substance that comprise a polymer of nucleotides linked via a phosphodiester bond. Exemplary nucleic acids include ribonucleic acids (RNAs), deoxyribonucleic acids (DNAs), threose nucleic acids (TNAs), glycol nucleic acids (GNAs), peptide nucleic acids (PNAs), locked nucleic acids (LNAs) or hybrids thereof. They may also include RNAi-inducing agents, RNAi agents, siRNAs, shRNAs, miRNAs, antisense RNAs, ribozymes, catalytic DNA, RNA, RNAs that induce triple helix formation, aptamers, vectors, etc. In some embodiments, the nucleic acid encoding the Cas protein is an mRNA. In some embodiments, the Cas protein is encoded by a modified nucleic acid (e.g., a synthetic, modified mRNA described herein).

[0193] The present invention contemplates the use of any nucleic acid modification available to the skilled artisan. The nucleic acids of the present invention can include any number of modifications. In some embodiments, the nucleic acid comprises one or more modifications selected from the group consisting of pyridin-4-one ribonucleoside, 5-aza-uridine, 2-thio-5-aza-uridine, 2-thiouridine, 4-thio-pseudouridine, 2-thio-pseudouridine, 5-hydroxyuridine, 3-methyluridine, 5-carboxymethyl-uridine, 1-carboxymethyl-pseudouridine, 5-propynyl-uridine, 1-propynyl-pseudouridine, 5-taurinomethyluridine, 1-taurinomethyl-pseudouridine, 5-taurinomethyl-2-thio-uridine, 1-taurinomethyl-4-thio-uridine, 5-methyl-uridine, 1-methyl-pseudouridine, 4-thio-1-methyl-pseudouridine, 2-thio-1-methyl-pseudouridine, 1-methyl-1-deaza-pseudouridine, 2-thio-1-methyl-1-deaza-pseudouridine, dihydrouridine, dihydropseudouridine, 2-thio-dihydrouridine, 2-thio-dihydropseudouridine, 2-methoxyuridine, 2-methoxy-4-thio-uridine, 4-methoxy-pseudouridine, 4-methoxy-2-thio-pseudouridine, 5-aza-cytidine, pseudoisocytidine, 3-methyl-cytidine, N4-acetylcytidine, 5-formylcytidine, N4-methylcytidine, 5-hydroxymethylcytidine, 1-methyl-pseudoisocytidine, pyrrolo-cytidine, pyrrolo-pseudoisocytidine, 2-thio-cytidine, 2-thio-5-methyl-cytidine, 4-thio-pseudoisocytidine, 4-thio-1-methyl-pseudoisocytidine, 4-thio-1-methyl-1-deaza-pseudoisocytidine, 1-methyl-1-deaza-pseudoisocytidine, zebularine, 5-aza-zebularine, 5-methyl-zebularine, 5-aza-2-thio-zebularine, 2-thio-zebularine, 2-methoxy-cytidine, 2-methoxy-5-methyl-cytidine, 4-methoxy-pseudoisocytidine, 4-methoxy-1-methyl-pseudoisocytidine, 2-aminopurine, 2,6-diaminopurine, 7-deaza-adenine, 7-deaza-8-aza-adenine, 7-deaza-2-aminopurine, 7-deaza-8-aza-2-aminopurine, 7-deaza-2,6-diaminopurine, 7-deaza-8-aza-2,6-diaminopurine, 1-methyladenosine, N6-methyladenosine, N6-isopentenyladenosine, N6-(cis-hydroxyisopentenyl)adenosine, 2-methylthio-N6-(cis-hydroxyisopentenyl)adenosine, N6-glycinylcarbamoyladenosine, N6-threonylcarbamoyladenosine, 2-methylthio-N6-threonyl carbamoyladenosine, N6,N6-dimethyladenosine, 7-methyladenine, 2-methylthio-adenine, and 2-methoxy-adenine, inosine, 1-methyl-inosine, wyosine, wybutosine, 7-deaza-guanosine, 7-deaza-8-aza-guanosine, 6-thio-guanosine, 6-thio-7-deaza-guanosine, 6-thio-7-deaza-8-aza-guanosine, 7-methyl-guanosine, 6-thio-7-methyl-guanosine, 7-methylinosine, 6-methoxy-guanosine, 1-methylguanosine, N2-methylguanosine, N2,N2-dimethylguanosine, 8-oxo-guanosine, 7-methyl-8-oxo-guanosine, 1-methyl-6-thio-guanosine, N2-methyl-6-thio-guanosine, and N2,N2-dimethyl-6-thio-guanosine, and combinations thereof.

[0194] Preparation of modified nucleosides and nucleotides used in the manufacture or synthesis of modified RNAs of the present invention can involve the protection and deprotection of various chemical groups. The need for protection and deprotection, and the selection of appropriate protecting groups can be readily determined by one skilled in the art.

[0195] The chemistry of protecting groups can be found, for example, in Greene, et al., Protective Groups in Organic Synthesis, 2d. Ed., Wiley & Sons, 1991, which is incorporated herein by reference in its entirety.

[0196] Modified nucleosides and nucleotides can be prepared according to the synthetic methods described in Ogata et al. Journal of Organic Chemistry 74:2585-2588, 2009; Purmal et al. Nucleic Acids Research 22 (1): 72-78, 1994; Fukuhara et al. Biochemistry 1(4): 563-568, 1962; and Xu et al. Tetrahedron 48(9): 1729-1740, 1992, each of which are incorporated by reference in their entirety.

[0197] Modified nucleic acids (e.g., ribonucleic acids) need not be uniformly modified along the entire length of the molecule. Different nucleotide modifications and/or backbone structures may exist at various positions in the nucleic acid. One of ordinary skill in the art will appreciate that the nucleotide analogs or other modification(s) may be located at any position(s) of a nucleic acid such that the function of the nucleic acid is not substantially decreased. A modification may also be a 5′ or 3′ terminal modification. The nucleic acids may contain at a minimum one and at maximum 100% modified nucleotides, or any intervening percentage, such as at least 50% modified nucleotides, at least 80% modified nucleotides, or at least 90% modified nucleotides.

[0198] In some embodiments, at least one ribonucleic acid is a modified ribonucleic acid. In some embodiments, at least one of the one to two ribonucleic acids is a modified ribonucleic acid. In some embodiments, each of the one to two ribonucleic acids is a modified ribonucleic acid. In some embodiments, at least one of the multiple ribonucleic acids is a modified ribonucleic acid. In some embodiments, a plurality of the multiple ribonucleic acids are modified. In some embodiments, each of the multiple ribonucleic acids are modified. Those skilled in the art will appreciate that the modified ribonucleic acids can include one or more of the nucleic acid modification described herein.

[0199] In some aspects, provided herein are synthetic, modified RNA molecules encoding polypeptides, where the synthetic, modified RNA molecules comprise one or more modifications, such that introducing the synthetic, modified RNA molecules to a cell results in a reduced innate immune response relative to a cell contacted with synthetic RNA molecules encoding the polypeptides not comprising the one or more modifications. In some embodiments, the Cas protein comprises a synthetic, modified RNA molecule encoding a Cas protein. In some embodiments, the Cas protein comprises a synthetic, modified RNA molecule encoding a Cas9 protein. In some embodiments, the Cas protein comprises a synthetic, modified RNA molecule encoding a Cpf1 protein.

[0200] The synthetic, modified RNAs described herein include modifications to prevent rapid degradation by endo- and exo-nucleases and to avoid or reduce the cell's innate immune or interferon response to the RNA. Modifications include, but are not limited to, for example, (a) end modifications, e.g., 5′ end modifications (phosphorylation dephosphorylation, conjugation, inverted linkages, etc.), 3′ end modifications (conjugation, DNA nucleotides, inverted linkages, etc.), (b) base modifications, e.g., replacement with modified bases, stabilizing bases, destabilizing bases, or bases that base pair with an expanded repertoire of partners, or conjugated bases, (c) sugar modifications (e.g., at the 2′ position or 4′ position) or replacement of the sugar, as well as (d) internucleoside linkage modifications, including modification or replacement of the phosphodiester linkages. To the extent that such modifications interfere with translation (i.e., results in a reduction of 50% or more in translation relative to the lack of the modification-e.g., in a rabbit reticulocyte in vitro translation assay), the modification is not suitable for the methods and compositions described herein. Specific examples of synthetic, modified RNA compositions useful with the methods described herein include, but are not limited to, RNA molecules containing modified or non-natural internucleoside linkages. Synthetic, modified RNAs having modified internucleoside linkages include, among others, those that do not have a phosphorus atom in the internucleoside linkage. In other embodiments, the synthetic, modified RNA has a phosphorus atom in its internucleoside linkage(s).

[0201] Non-limiting examples of modified internucleoside linkages include phosphorothioates, chiral phosphorothioates, phosphorodithioates, phosphotriesters, aminoalkylphosphotriesters, methyl and other alkyl phosphonates including 3′-alkylene phosphonates and chiral phosphonates, phosphinates, phosphoramidates including 3′-amino phosphoramidate and aminoalkylphosphoramidates, thionophosphoramidates, thionoalkylphosphonates, thionoalkylphosphotriesters, and boranophosphates having normal 3′-5′ linkages, 2′-5′ linked analogs of these, and those) having inverted polarity wherein the adjacent pairs of nucleoside units are linked 3′-5′ to 5′-3′ or 2′-5′ to 5′-2′. Various salts, mixed salts and free acid forms are also included.

[0202] Representative U.S. patents that teach the preparation of the above phosphorus-containing linkages include, but are not limited to, U.S. Pat. Nos. 3,687,808; 4,469,863; 4,476,301; 5,023,243; 5,177,195; 5,188,897; 5,264,423; 5,276,019; 5,278,302; 5,286,717; 5,321,131; 5,399,676; 5,405,939; 5,453,496; 5,455,233; 5,466,677; 5,476,925; 5,519,126; 5,536,821; 5,541,316; 5,550,111; 5,563,253; 5,571,799; 5,587,361; 5,625,050; 6,028,188; 6,124,445; 6,160,109; 6,169,170; 6,172,209; 6,239,265; 6,277,603; 6,326,199; 6,346,614; 6,444,423; 6,531,590; 6,534,639; 6,608,035; 6,683,167; 6,858,715; 6,867,294; 6,878,805; 7,015,315; 7,041,816; 7,273,933; 7,321,029; and U.S. Pat. RE39464, each of which is herein incorporated by reference in its entirety.

[0203] Modified internucleoside linkages that do not include a phosphorus atom therein have internucleoside linkages that are formed by short chain alkyl or cycloalkyl internucleoside linkages, mixed heteroatoms and alkyl or cycloalkyl internucleoside linkages, or one or more short chain heteroatomic or heterocyclic internucleoside linkages. These include those having morpholino linkages (formed in part from the sugar portion of a nucleoside); siloxane backbones; sulfide, sulfoxide and sulfone backbones; formacetyl and thioformacetyl backbones; methylene formacetyl and thioformacetyl backbones; alkene containing backbones; sulfamate backbones; methyleneimino and methylenehydrazino backbones; sulfonate and sulfonamide backbones; amide backbones; and others having mixed N, O, S and CH2 component parts.

[0204] Representative U.S. patents that teach the preparation of modified oligonucleosides include, but are not limited to, U.S. Pat. Nos. 5,034,506; 5,166,315; 5,185,444; 5,214,134; 5,216,141; 5,235,033; 5,64,562; 5,264,564; 5,405,938; 5,434,257; 5,466,677; 5,470,967; 5,489,677; 5,541,307; 5,561,225; 5,596,086; 5,602,240; 5,608,046; 5,610,289; 5,618,704; 5,623,070; 5,663,312; 5,633,360; 5,677,437; and 5,677,439, each of which is herein incorporated by reference in its entirety.

[0205] Some embodiments of the synthetic, modified RNAs described herein include nucleic acids with phosphorothioate internucleoside linkages and oligonucleosides with heteroatom internucleoside linkage, and in particular —CH2-NH—CH2-, —CH2-N(CH3)-O—CH2-[known as a methylene (methylimino) or MMI], —CH2-O—N(CH3)-CH2-, —CH2-N(CH3)-N(CH3)-CH2- and —N(CH3)-CH2-CH2- [wherein the native phosphodiester internucleoside linkage is represented as —O—P—O—CH2-] of the above-referenced U.S. Pat. No. 5,489,677, and the amide backbones of the above-referenced U.S. Pat. No. 5,602,240, both of which are herein incorporated by reference in their entirety. In some embodiments, the nucleic acid sequences featured herein have morpholino backbone structures of the above-referenced U.S. Pat. No. 5,034,506, herein incorporated by reference in its entirety.

[0206] Synthetic, modified RNAs described herein can also contain one or more substituted sugar moieties. The nucleic acids featured herein can include one of the following at the 2′ position: H (deoxyribose); OH (ribose); F; O—, S—, or N-alkyl; O—, S—, or N-alkenyl; O—, S— or N-alkynyl; or O-alkyl-O-alkyl, wherein the alkyl, alkenyl and alkynyl can be substituted or unsubstituted C1 to C10 alkyl or C2 to C10 alkenyl and alkynyl. Exemplary modifications include O[(CH2)nO]mCH3, O(CH2).nOCH3, O(CH2)nNH2, O(CH2)nCH3, O(CH2)nONH2, and O(CH2)nON[(CH2)nCH3)]2, where n and m are from 1 to about 10. In some embodiments, synthetic, modified RNAs include one of the following at the 2′ position: C1 to C10 lower alkyl, substituted lower alkyl, alkaryl, aralkyl, O-alkaryl or O-aralkyl, SH, SCH3, OCN, Cl, Br, CN, CF3, OCF3, SOCH3, SO2CH3, ONO2, NO2, N3, NH2, heterocycloalkyl, heterocycloalkaryl, aminoalkylamino, polyalkylamino, substituted silyl, a reporter group, an intercalator, a group for improving the pharmacokinetic properties of an RNA, or a group for improving the pharmacodynamic properties of a synthetic, modified RNA, and other substituents having similar properties. In some embodiments, the modification includes a 2′ methoxyethoxy (2′-O—CH2CH2OCH3, also known as 2′-O-(2-methoxyethyl) or 2′-MOE) (Martin et al., Helv. Chim. Acta, 1995, 78:486-504) i.e., an alkoxy-alkoxy group. Another exemplary modification is 2′-dimethylaminooxyethoxy, i.e., a O(CH2)2ON(CH3)2 group, also known as 2′-DMAOE, and 2′-dimethylaminoethoxyethoxy (also known in the art as 2′-O-dimethylaminoethoxyethyl or 2′-DMAEOE), i.e., 2′-O—CH2-O—CH2-N(CH2)2.

[0207] Other modifications include 2′-methoxy (2′-OCH3), 2′-aminopropoxy (2′-OCH2CH2CH2NH2) and 2′-fluoro (2′-F). Similar modifications can also be made at other positions on the nucleic acid sequence, particularly the 3′ position of the sugar on the 3′ terminal nucleotide or in 2′-5′ linked nucleotides and the 5′ position of 5′ terminal nucleotide. A synthetic, modified RNA can also have sugar mimetics such as cyclobutyl moieties in place of the pentofuranosyl sugar. Representative U.S. patents that teach the preparation of such modified sugar structures include, but are not limited to, U.S. Pat. Nos. 4,981,957; 5,118,800; 5,319,080; 5,359,044; 5,393,878; 5,446,137; 5,466,786; 5,514,785; 5,519,134; 5,567,811; 5,576,427; 5,591,722; 5,597,909; 5,610,300; 5,627,053; 5,639,873; 5,646,265; 5,658,873; 5,670,633; and 5,700,920, certain of which are commonly owned with the instant application, and each of which is herein incorporated by reference in its entirety.

[0208] As non-limiting examples, synthetic, modified RNAs described herein can include at least one modified nucleoside including a 2′-O-methyl modified nucleoside, a nucleoside comprising a 5′ phosphorothioate group, a 2′-amino-modified nucleoside, 2′-alkyl-modified nucleoside, morpholino nucleoside, a phosphoramidate or a non-natural base comprising nucleoside, or any combination thereof.

[0209] In some embodiments of this aspect and all other such aspects described herein, the at least one modified nucleoside is selected from the group consisting of 5-methylcytidine (5mC), N6-methyladenosine (m6A), 3,2′-O-dimethyluridine (m4U), 2-thiouridine (s2U), 2′ fluorouridine, pseudouridine, 2′-O-methyluridine (Um), 2′ deoxyuridine (2′ dU), 4-thiouridine (s4U), 5-methyluridine (m5U), 2′-O-methyladenosine (m6A), N6,2′-O-dimethyladenosine (m6Am), N6,N6,2′-O-trimethyladenosine (m62Am), 2′-O-methylcytidine (Cm), 7-methylguanosine (m7G), 2′-O-methylguanosine (Gm), N2,7-dimethylguanosine (m2,7G), N2,N2,7-trimethylguanosine (m2,2,7G), and inosine (I).

[0210] Alternatively, a synthetic, modified RNA can comprise at least two modified nucleosides, at least 3, at least 4, at least 5, at least 6, at least 7, at least 8, at least 9, at least 10, at least 15, at least 20 or more, up to the entire length of the nucleotide. At a minimum, a synthetic, modified RNA molecule comprising at least one modified nucleoside comprises a single nucleoside with a modification as described herein. It is not necessary for all positions in a given synthetic, modified RNA to be uniformly modified, and in fact more than one of the aforementioned modifications can be incorporated in a single synthetic, modified RNA or even at a single nucleoside within a synthetic, modified RNA. However, it is preferred, but not absolutely necessary, that each occurrence of a given nucleoside in a molecule is modified (e.g., each cytosine is a modified cytosine e.g., 5mC). However, it is also contemplated that different occurrences of the same nucleoside can be modified in a different way in a given synthetic, modified RNA molecule (e.g., some cytosines modified as 5mC, others modified as 2′-O-methylcytidine or other cytosine analog). The modifications need not be the same for each of a plurality of modified nucleosides in a synthetic, modified RNA. Furthermore, in some embodiments of the aspects described herein, a synthetic, modified RNA comprises at least two different modified nucleosides. In some such preferred embodiments of the aspects described herein, the at least two different modified nucleosides are 5-methylcytidine and pseudouridine. A synthetic, modified RNA can also contain a mixture of both modified and unmodified nucleosides.

[0211] As used herein, “unmodified” or “natural” nucleosides or nucleobases include the purine bases adenine (A) and guanine (G), and the pyrimidine bases thymine (T), cytosine (C) and uracil (U). In some embodiments, a synthetic, modified RNA comprises at least one nucleoside (“base”) modification or substitution. Modified nucleosides include other synthetic and natural nucleobases such as inosine, xanthine, hypoxanthine, nubularine, isoguanisine, tubercidine, 2-(halo)adenine, 2-(alkyl)adenine, 2-(propyl)adenine, 2 (amino)adenine, 2-(aminoalkyl)adenine, 2 (aminopropyl)adenine, 2 (methylthio) N6 (isopentenyl)adenine, 6 (alkyl)adenine, 6 (methyl)adenine, 7 (deaza)adenine, 8 (alkenyl)adenine, 8-(alkyl)adenine, 8 (alkynyl)adenine, 8 (amino)adenine, 8-(halo)adenine, 8-(hydroxyl)adenine, 8 (thioalkyl)adenine, 8-(thiol)adenine, N6-(isopentyl)adenine, N6 (methyl)adenine, N6, N6 (dimethyl)adenine, 2-(alkyl)guanine, 2 (propyl)guanine, 6-(alkyl)guanine, 6 (methyl)guanine, 7 (alkyl)guanine, 7 (methyl)guanine, 7 (deaza)guanine, 8 (alkyl)guanine, 8-(alkenyl)guanine, 8 (alkynyl)guanine, 8-(amino)guanine, 8 (halo)guanine, 8-(hydroxyl)guanine, 8 (thioalkyl)guanine, 8-(thiol)guanine, N (methyl)guanine, 2-(thio)cytosine, 3 (deaza) 5 (aza)cytosine, 3-(alkyl)cytosine, 3 (methyl)cytosine, 5-(alkyl)cytosine, 5-(alkynyl)cytosine, 5 (halo)cytosine, 5 (methyl)cytosine, 5 (propynyl)cytosine, 5 (propynyl)cytosine, 5 (trifluoromethyl)cytosine, 6-(azo)cytosine, N4 (acetyl)cytosine, 3 (3 amino-3 carboxypropyl)uracil, 2-(thio)uracil, 5 (methyl) 2 (thio)uracil, 5 (methylaminomethyl)-2 (thio)uracil, 4-(thio)uracil, 5 (methyl) 4 (thio)uracil, 5 (methylaminomethyl)-4 (thio)uracil, 5 (methyl) 2,4 (dithio)uracil, 5 (methylaminomethyl)-2,4 (dithio)uracil, 5 (2-aminopropyl)uracil, 5-(alkyl)uracil, 5-(alkynyl)uracil, 5-(allylamino)uracil, 5 (aminoallyl)uracil, 5 (aminoalkyl)uracil, 5 (guanidiniumalkyl)uracil, 5 (1,3-diazole-1-alkyl)uracil, 5-(cyanoalkyl)uracil, 5-(dialkylaminoalkyl)uracil, 5 (dimethylaminoalkyl)uracil, 5-(halo)uracil, 5-(methoxy)uracil, uracil-5 oxyacetic acid, 5 (methoxycarbonylmethyl)-2-(thio)uracil, 5 (methoxycarbonyl-methyl)uracil, 5 (propynyl)uracil, 5 (propynyl)uracil, 5 (trifluoromethyl)uracil, 6 (azo)uracil, dihydrouracil, N3 (methyl)uracil, 5-uracil (i.e., pseudouracil), 2 (thio)pseudouracil,4 (thio)pseudouracil,2,4-(dithio)psuedouracil,5-(alkyl)pseudouracil, 5-(methyl)pseudouracil, 5-(alkyl)-2-(thio)pseudouracil, 5-(methyl)-2-(thio)pseudouracil, 5-(alkyl)-4 (thio)pseudouracil, 5-(methyl)-4 (thio)pseudouracil, 5-(alkyl)-2,4 (dithio)pseudouracil, 5-(methyl)-2,4 (dithio)pseudouracil, 1 substituted pseudouracil, 1 substituted 2(thio)-pseudouracil, 1 substituted 4 (thio)pseudouracil, 1 substituted 2,4-(dithio)pseudouracil, 1 (aminocarbonylethylenyl)-pseudouracil, 1 (aminocarbonylethylenyl)-2(thio)-pseudouracil, 1 (aminocarbonylethylenyl)-4 (thio)pseudouracil, 1 (aminocarbonylethylenyl)-2,4-(dithio)pseudouracil, 1 (aminoalkylaminocarbonylethylenyl)-pseudouracil, 1 (aminoalkylamino-carbonylethylenyl)-2(thio)-pseudouracil, 1 (aminoalkylaminocarbonylethylenyl)-4 (thio)pseudouracil, 1 (aminoalkylaminocarbonylethylenyl)-2,4-(dithio)pseudouracil, 1,3-(diaza)-2-(oxo)-phenoxazin-1-yl, 1-(aza)-2-(thio)-3-(aza)-phenoxazin-1-yl, 1,3-(diaza)-2-(oxo)-phenthiazin-1-yl, 1-(aza)-2-(thio)-3-(aza)-phenthiazin-1-yl, 7-substituted 1,3-(diaza)-2-(oxo)-phenoxazin-1-yl, 7-substituted 1-(aza)-2-(thio)-3-(aza)-phenoxazin-1-yl, 7-substituted 1,3-(diaza)-2-(oxo)-phenthiazin-1-yl, 7-substituted 1-(aza)-2-(thio)-3-(aza)-phenthiazin-1-yl, 7-(aminoalkylhydroxy)-1,3-(diaza)-2-(oxo)-phenoxazin-1-yl, 7-(aminoalkylhydroxy)-1-(aza)-2-(thio)-3-(aza)-phenoxazin-1-yl, 7-(aminoalkylhydroxy)-1,3-(diaza)-2-(oxo)-phenthiazin-1-yl, 7-(aminoalkylhydroxy)-1-(aza)-2-(thio)-3-(aza)-phenthiazin-1-yl, 7-(guanidiniumalkylhydroxy)-1,3-(diaza)-2-(oxo)-phenoxazin-1-yl, 7-(guanidiniumalkylhydroxy)-1-(aza)-2-(thio)-3-(aza)-phenoxazin-1-yl, 7-(guanidiniumalkylhydroxy)-1,3-(diaza)-2-(oxo)-phenthiazin-1-yl, 7-(guanidiniumalkylhydroxy)-1-(aza)-2-(thio)-3-(aza)-phenthiazin-1-yl, 1,3,5-(triaza)-2,6-(dioxa)-naphthalene, inosine, xanthine, hypoxanthine, nubularine, tubercidine, isoguanisine, inosinyl, 2-aza-inosinyl, 7-deaza-inosinyl, nitroimidazolyl, nitropyrazolyl, nitrobenzimidazolyl, nitroindazolyl, aminoindolyl, pyrrolopyrimidinyl, 3-(methyl)isocarbostyrilyl, 5-(methyl)isocarbostyrilyl, 3-(methyl)-7-(propynyl)isocarbostyrilyl, 7-(aza)indolyl, 6-(methyl)-7-(aza)indolyl, imidizopyridinyl, 9-(methyl)-imidizopyridinyl, pyrrolopyrizinyl, isocarbostyrilyl, 7-(propynyl)isocarbostyrilyl, propynyl-7-(aza)indolyl, 2,4,5-(trimethyl)phenyl, 4-(methyl)indolyl, 4,6-(dimethyl)indolyl, phenyl, napthalenyl, anthracenyl, phenanthracenyl, pyrenyl, stilbenzyl, tetracenyl, pentacenyl, difluorotolyl, 4-(fluoro)-6-(methyl)benzimidazole, 4-(methyl)benzimidazole, 6-(azo)thymine, 2-pyridinone, 5 nitroindole, 3 nitropyrrole, 6-(aza)pyrimidine, 2 (amino)purine, 2,6-(diamino)purine, 5 substituted pyrimidines, N2-substituted purines, N6-substituted purines, 06-substituted purines, substituted 1,2,4-triazoles, pyrrolo-pyrimidin-2-on-3-yl, 6-phenyl-pyrrolo-pyrimidin-2-on-3-yl, para-substituted-6-phenyl-pyrrolo-pyrimidin-2-on-3-yl, ortho-substituted-6-phenyl-pyrrolo-pyrimidin-2-on-3-yl, bis-ortho-substituted-6-phenyl-pyrrolo-pyrimidin-2-on-3-yl, para-(aminoalkylhydroxy)-6-phenyl-pyrrolo-pyrimidin-2-on-3-yl, ortho-(aminoalkylhydroxy)-6-phenyl-pyrrolo-pyrimidin-2-on-3-yl, bis-ortho-(aminoalkylhydroxy)-6-phenyl-pyrrolo-pyrimidin-2-on-3-yl, pyridopyrimidin-3-yl, 2-oxo-7-amino-pyridopyrimidin-3-yl, 2-oxo-pyridopyrimidine-3-yl, or any O-alkylated or N-alkylated derivatives thereof. Modified nucleosides also include natural bases that comprise conjugated moieties, e.g. a ligand. As discussed herein above, the RNA containing the modified nucleosides must be translatable in a host cell (i.e., does not prevent translation of the polypeptide encoded by the modified RNA). For example, transcripts containing s2U and m6A are translated poorly in rabbit reticulocyte lysates, while pseudouridine, m5U, and m5C are compatible with efficient translation. In addition, it is known in the art that 2′-fluoro-modified bases useful for increasing nuclease resistance of a transcript, leads to very inefficient translation. Translation can be assayed by one of ordinary skill in the art using e.g., a rabbit reticulocyte lysate translation assay.

[0212] Further modified nucleobases include those disclosed in U.S. Pat. No. 3,687,808, those disclosed in Modified Nucleosides in Biochemistry, Biotechnology and Medicine, Herdewijn, P. ed. Wiley-VCH, 2008; those disclosed in Int. Appl. No. PCT/US09/038,425, filed Mar. 26, 2009; those disclosed in The Concise Encyclopedia Of Polymer Science And Engineering, pages 858-859, Kroschwitz, J. L, ed. John Wiley & Sons, 1990, and those disclosed by Englisch et al., Angewandte Chemie, International Edition, 1991, 30, 613.

[0213] Representative U.S. patents that teach the preparation of certain of the above noted modified nucleobases as well as other modified nucleobases include, but are not limited to, the above noted U.S. Pat. No. 3,687,808, as well as U.S. Pat. Nos. 4,845,205; 5,130,30; 5,134,066; 5,175,273; 5,367,066; 5,432,272; 5,457,187; 5,457,191; 5,459,255; 5,484,908; 5,502,177; 5,525,711; 5,552,540; 5,587,469; 5,594,121, 5,596,091; 5,614,617; 5,681,941; 6,015,886; 6,147,200; 6,166,197; 6,222,025; 6,235,887; 6,380,368; 6,528,640; 6,639,062; 6,617,438; 7,045,610; 7,427,672; and 7,495,088, each of which is herein incorporated by reference in its entirety, and U.S. Pat. No. 5,750,692, also herein incorporated by reference in its entirety.

[0214] Another modification for use with the synthetic, modified RNAs described herein involves chemically linking to the RNA one or more ligands, moieties or conjugates that enhance the activity, cellular distribution or cellular uptake of the RNA. The synthetic, modified RNAs described herein can further comprise a 5′ cap. In some embodiments of the aspects described herein, the synthetic, modified RNAs comprise a 5′ cap comprising a modified guanine nucleotide that is linked to the 5′ end of an RNA molecule using a 5′-5′ triphosphate linkage. As used herein, the term “5′ cap” is also intended to encompass other 5′ cap analogs including, e.g., 5′ diguanosine cap, tetraphosphate cap analogs having a methylene-bis(phosphonate) moiety (see e.g., Rydzik, A M et al., (2009) Org Biomol Chem 7(22):4763-76), dinucleotide cap analogs having a phosphorothioate modification (see e.g., Kowalska, J. et al., (2008) RNA 14(6):1119-1131), cap analogs having a sulfur substitution for a non-bridging oxygen (see e.g., Grudzien-Nogalska, E. et al., (2007) RNA 13(10): 1745-1755), N7-benzylated dinucleoside tetraphosphate analogs (see e.g., Grudzien, E. et al., (2004) RNA 10(9):1479-1487), or anti-reverse cap analogs (see e.g., Jemielity, J. et al., (2003) RNA 9(9): 1108-1122 and Stepinski, J. et al., (2001) RNA 7(10):1486-1495). In one such embodiment, the 5′ cap analog is a 5′ diguanosine cap. In some embodiments, the synthetic, modified RNA does not comprise a 5′ triphosphate.

[0215] The 5′ cap is important for recognition and attachment of an mRNA to a ribosome to initiate translation. The 5′ cap also protects the synthetic, modified RNA from 5′ exonuclease mediated degradation. It is not an absolute requirement that a synthetic, modified RNA comprise a 5′ cap, and thus in other embodiments the synthetic, modified RNAs lack a 5′ cap. However, due to the longer half-life of synthetic, modified RNAs comprising a 5′ cap and the increased efficiency of translation, synthetic, modified RNAs comprising a 5′ cap are preferred herein.

[0216] The synthetic, modified RNAs described herein can further comprise a 5′ and/or 3′ untranslated region (UTR). Untranslated regions are regions of the RNA before the start codon (5′) and after the stop codon (3′), and are therefore not translated by the translation machinery. Modification of an RNA molecule with one or more untranslated regions can improve the stability of an mRNA, since the untranslated regions can interfere with ribonucleases and other proteins involved in RNA degradation. In addition, modification of an RNA with a 5′ and/or 3′ untranslated region can enhance translational efficiency by binding proteins that alter ribosome binding to an mRNA. Modification of an RNA with a 3′ UTR can be used to maintain a cytoplasmic localization of the RNA, permitting translation to occur in the cytoplasm of the cell. In one embodiment, the synthetic, modified RNAs described herein do not comprise a 5′ or 3′ UTR. In another embodiment, the synthetic, modified RNAs comprise either a 5′ or 3′ UTR. In another embodiment, the synthetic, modified RNAs described herein comprise both a 5′ and a 3′ UTR. In one embodiment, the 5′ and/or 3′ UTR is selected from an mRNA known to have high stability in the cell (e.g., a murine alpha-globin 3′ UTR). In some embodiments, the 5′ UTR, the 3′ UTR, or both comprise one or more modified nucleosides.

[0217] In some embodiments, the synthetic, modified RNAs described herein further comprise a Kozak sequence. The “Kozak sequence” refers to a sequence on eukaryotic mRNA having the consensus (gcc)gccRccAUGG (SEQ ID NO: 2715), where R is a purine (adenine or guanine) three bases upstream of the start codon (AUG), which is followed by another ‘G’. The Kozak consensus sequence is recognized by the ribosome to initiate translation of a polypeptide. Typically, initiation occurs at the first AUG codon encountered by the translation machinery that is proximal to the 5′ end of the transcript. However, in some cases, this AUG codon can be bypassed in a process called leaky scanning. The presence of a Kozak sequence near the AUG codon will strengthen that codon as the initiating site of translation, such that translation of the correct polypeptide occurs. Furthermore, addition of a Kozak sequence to a synthetic, modified RNA will promote more efficient translation, even if there is no ambiguity regarding the start codon. Thus, in some embodiments, the synthetic, modified RNAs described herein further comprise a Kozak consensus sequence at the desired site for initiation of translation to produce the correct length polypeptide. In some such embodiments, the Kozak sequence comprises one or more modified nucleosides.

[0218] In some embodiments, the synthetic, modified RNAs described herein further comprise a “poly (A) tail”, which refers to a 3′ homopolymeric tail of adenine nucleotides, which can vary in length (e.g., at least 5 adenine nucleotides) and can be up to several hundred adenine nucleotides). The inclusion of a 3′ poly (A) tail can protect the synthetic, modified RNA from degradation in the cell, and also facilitates extra-nuclear localization to enhance translation efficiency. In some embodiments, the poly (A) tail comprises between 1 and 500 adenine nucleotides (SEQ ID NO: 2714); in other embodiments the poly (A) tail comprises at least 5, at least 10, at least 20, at least 30, at least 40, at least 50, at least 60, at least 70, at least 80, at least 90, at least 100, at least 110, at least 120, at least 130, at least 140, at least 150, at least 160, at least 170, at least 180, at least 190, at least 200, at least 225, at least 250, at least 275, at least 300, at least 325, at least 350, at least 375, at least 400, at least 425, at least 450, at least 475, at least 500 adenine nucleotides or more. In one embodiment, the poly (A) tail comprises between 1 and 150 adenine nucleotides. In another embodiment, the poly (A) tail comprises between 90 and 120 adenine nucleotides. In some such embodiments, the poly (A) tail comprises one or more modified nucleosides.

[0219] It is contemplated that one or more modifications to the synthetic, modified RNAs described herein permit greater stability of the synthetic, modified RNA in a cell. To the extent that such modifications permit translation and either reduce or do not exacerbate a cell's innate immune or interferon response to the synthetic, modified RNA with the modification, such modifications are specifically contemplated for use herein. Generally, the greater the stability of a synthetic, modified RNA, the more protein can be produced from that synthetic, modified RNA. Typically, the presence of AU-rich regions in mammalian mRNAs tend to destabilize transcripts, as cellular proteins are recruited to AU-rich regions to stimulate removal of the poly (A) tail of the transcript. Loss of a poly (A) tail of a synthetic, modified RNA can result in increased RNA degradation. Thus, in one embodiment, a synthetic, modified RNA as described herein does not comprise an AU-rich region. In particular, it is preferred that the 3′ UTR substantially lacks AUUUA sequence elements.

[0220] In one embodiment, a ligand alters the cellular uptake, intracellular targeting or half-life of a synthetic, modified RNA into which it is incorporated. In some embodiments a ligand provides an enhanced affinity for a selected target, e.g., molecule, cell or cell type, intracellular compartment, e.g., mitochondria, cytoplasm, peroxisome, lysosome, as, e.g., compared to a composition absent such a ligand. Preferred ligands do not interfere with expression of a polypeptide from the synthetic, modified RNA.

[0221] The ligand can be a substance, e.g., a drug, which can increase the uptake of the synthetic, modified RNA or a composition thereof into the cell, for example, by disrupting the cell's cytoskeleton, e.g., by disrupting the cell's microtubules, microfilaments, and/or intermediate filaments. The drug can be, for example, taxol, vincristine, vinblastine, cytochalasin, nocodazole, japlakinolide, latrunculin A, phalloidin, swinholide A, indanocine, or myoservin.

[0222] In another aspect, the ligand is a moiety, e.g., a vitamin, which is taken up by a host cell. Exemplary vitamins include vitamin A, E, and K. Other exemplary vitamins include B vitamin, e.g., folic acid, B12, riboflavin, biotin, pyridoxal or other vitamins or nutrients taken up, for example, by cancer cells. Also included are HSA and low density lipoprotein (LDL).

[0223] In another aspect, the ligand is a cell-permeation agent, preferably a helical cell-permeation agent. Preferably, the agent is amphipathic. An exemplary agent is a peptide such as tat or antennopedia. If the agent is a peptide, it can be modified, including a peptidylmimetic, invertomers, non-peptide or pseudo-peptide linkages, and use of D-amino acids. The helical agent is preferably an alpha-helical agent, which preferably has a lipophilic and a lipophobic phase.

[0224] A “cell permeation peptide” is capable of permeating a cell, e.g., a microbial cell, such as a bacterial or fungal cell, or a mammalian cell, such as a human cell. A microbial cell-permeating peptide can be, for example, an α-helical linear peptide (e.g., LL-37 or Ceropin P1), a disulfide bond-containing peptide (e.g., α-defensin, β-defensin or bactenecin), or a peptide containing only one or two dominating amino acids (e.g., PR-39 or indolicidin). For example, a cell permeation peptide can be a bipartite amphipathic peptide, such as MPG, which is derived from the fusion peptide domain of HIV-1 gp41 and the NLS of SV40 large T antigen (Simeoni et al., Nucl. Acids Res. 31:2717-2724, 2003).

[0225] The synthetic, modified RNAs described herein can be synthesized and/or modified by methods well established in the art, such as those described in “Current Protocols in Nucleic Acid Chemistry,” Beaucage, S. L. et al. (Edrs.), John Wiley & Sons, Inc., New York, N.Y., USA, which is hereby incorporated herein by reference in its entirety. Transcription methods are described further herein in the Examples.

[0226] In one embodiment of the aspects described herein, a template for a synthetic, modified RNA is synthesized using “splint-mediated ligation,” which allows for the rapid synthesis of DNA constructs by controlled concatenation of long oligos and/or dsDNA PCR products and without the need to introduce restriction sites at the joining regions. It can be used to add generic untranslated regions (UTRs) to the coding sequences of genes during T7 template generation. Splint mediated ligation can also be used to add nuclear localization sequences to an open reading frame, and to make dominant-negative constructs with point mutations starting from a wild-type open reading frame. Briefly, single-stranded and/or denatured dsDNA components are annealed to splint oligos which bring the desired ends into conjunction, the ends are ligated by a thermostable DNA ligase and the desired constructs amplified by PCR. A synthetic, modified RNA is then synthesized from the template using an RNA polymerase in vitro. After synthesis of a synthetic, modified RNA is complete, the DNA template is removed from the transcription reaction prior to use with the methods described herein.

[0227] In some embodiments of these aspects, the synthetic, modified RNAs are further treated with an alkaline phosphatase.

[0228] One skilled in the art readily appreciates that the present invention is well adapted to carry out the objects and obtain the ends and advantages mentioned, as well as those inherent therein. The details of the description and the examples herein are representative of certain embodiments, are exemplary, and are not intended as limitations on the scope of the invention. Modifications therein and other uses will occur to those skilled in the art. These modifications are encompassed within the spirit of the invention. It will be readily apparent to a person skilled in the art that varying substitutions and modifications may be made to the invention disclosed herein without departing from the scope and spirit of the invention.

[0229] The articles “a” and “an” as used herein in the specification and in the claims, unless clearly indicated to the contrary, should be understood to include the plural referents. Claims or descriptions that include “or” between one or more members of a group are considered satisfied if one, more than one, or all of the group members are present in, employed in, or otherwise relevant to a given product or process unless indicated to the contrary or otherwise evident from the context. The invention includes embodiments in which exactly one member of the group is present in, employed in, or otherwise relevant to a given product or process. The invention also includes embodiments in which more than one, or all of the group members are present in, employed in, or otherwise relevant to a given product or process. Furthermore, it is to be understood that the invention provides all variations, combinations, and permutations in which one or more limitations, elements, clauses, descriptive terms, etc., from one or more of the listed claims is introduced into another claim dependent on the same base claim (or, as relevant, any other claim) unless otherwise indicated or unless it would be evident to one of ordinary skill in the art that a contradiction or inconsistency would arise. It is contemplated that all embodiments described herein are applicable to all different aspects of the invention where appropriate. It is also contemplated that any of the embodiments or aspects can be freely combined with one or more other such embodiments or aspects whenever appropriate. Where elements are presented as lists, e.g., in Markush group or similar format, it is to be understood that each subgroup of the elements is also disclosed, and any element(s) can be removed from the group. It should be understood that, in general, where the invention, or aspects of the invention, is/are referred to as comprising particular elements, features, etc., certain embodiments of the invention or aspects of the invention consist, or consist essentially of, such elements, features, etc. For purposes of simplicity those embodiments have not in every case been specifically set forth in so many words herein. It should also be understood that any embodiment or aspect of the invention can be explicitly excluded from the claims, regardless of whether the specific exclusion is recited in the specification. For example, any one or more active agents, additives, ingredients, optional agents, types of organism, disorders, subjects, or combinations thereof, can be excluded.

[0230] Where the claims or description relate to a composition of matter, it is to be understood that methods of making or using the composition of matter according to any of the methods disclosed herein, and methods of using the composition of matter for any of the purposes disclosed herein are aspects of the invention, unless otherwise indicated or unless it would be evident to one of ordinary skill in the art that a contradiction or inconsistency would arise. Where the claims or description relate to a method, e.g., it is to be understood that methods of making compositions useful for performing the method, and products produced according to the method, are aspects of the invention, unless otherwise indicated or unless it would be evident to one of ordinary skill in the art that a contradiction or inconsistency would arise.

[0231] Where ranges are given herein, the invention includes embodiments in which the endpoints are included, embodiments in which both endpoints are excluded, and embodiments in which one endpoint is included and the other is excluded. It should be assumed that both endpoints are included unless indicated otherwise. Furthermore, it is to be understood that unless otherwise indicated or otherwise evident from the context and understanding of one of ordinary skill in the art, values that are expressed as ranges can assume any specific value or subrange within the stated ranges in different embodiments of the invention, to the tenth of the unit of the lower limit of the range, unless the context clearly dictates otherwise. It is also understood that where a series of numerical values is stated herein, the invention includes embodiments that relate analogously to any intervening value or range defined by any two values in the series, and that the lowest value may be taken as a minimum and the greatest value may be taken as a maximum. Numerical values, as used herein, include values expressed as percentages. For any embodiment of the invention in which a numerical value is prefaced by “about” or “approximately”, the invention includes an embodiment in which the exact value is recited. For any embodiment of the invention in which a numerical value is not prefaced by “about” or “approximately”, the invention includes an embodiment in which the value is prefaced by “about” or “approximately”.

[0232] As used herein “A and/or B”, where A and B are different claim terms, generally means at least one of A, B, or both A and B. For example, one sequence which is complementary to and/or hybridizes to another sequence includes (i) one sequence which is complementary to the other sequence even though the one sequence may not necessarily hybridize to the other sequence under all conditions, (ii) one sequence which hybridizes to the other sequence even if the one sequence is not perfectly complementary to the other sequence, and (iii) sequences which are both complementary to and hybridize to the other sequence.

[0233] “Approximately” or “about” generally includes numbers that fall within a range of 1% or in some embodiments within a range of 5% of a number or in some embodiments within a range of 10% of a number in either direction (greater than or less than the number) unless otherwise stated or otherwise evident from the context (except where such number would impermissibly exceed 100% of a possible value). It should be understood that, unless clearly indicated to the contrary, in any methods claimed herein that include more than one act, the order of the acts of the method is not necessarily limited to the order in which the acts of the method are recited, but the invention includes embodiments in which the order is so limited. It should also be understood that unless otherwise indicated or evident from the context, any product or composition described herein may be considered “isolated”.

[0234] As used herein the term “comprising” or “comprises” is used in reference to compositions, methods, and respective component(s) thereof, that are essential to the invention, yet open to the inclusion of unspecified elements, whether essential or not.

[0235] As used herein the term “consisting essentially of” refers to those elements required for a given embodiment. The term permits the presence of additional elements that do not materially affect the basic and novel or functional characteristic(s) of that embodiment of the invention.

[0236] The term “consisting of” refers to compositions, methods, and respective components thereof as described herein, which are exclusive of any element not recited in that description of the embodiment.

### EXAMPLES

### Example 1: Efficient Ablation of Genes in Human Hematopoietic Stem and Effector Cells Using CRISPR/Cas9

[0237] The hematopoietic system is at the forefront of cell-based gene therapies due to the fact that the cells can be readily obtained, manipulated, and reintroduced into patients. The development of genome editing methodologies such as zinc finger nucleases (ZFNs) and transcription activator-like effector nucleases (TALENs) (Urnov et al., 2010); (Joung and Sander, 2013; Scharenberg et al., 2013) have enabled site-specific gene repair or ablation and raised the possibility of treating a broad range of diseases at the genetic level (Pan et al., 2013). Despite much promise, limitations associated with these technologies, including low targeting efficacy and de novo engineering of proteins for each target have precluded wide-spread adoption of these technologies for therapeutic use (Silva et al., 2011). The recent emergence of the clustered, regularly interspaced, palindromic repeats (CRISPR) system for gene editing has the potential to overcome these limitations (Jinek et al., 2012). The CRISPR technology utilizes a fixed nuclease, often the CRISPR-associated protein 9 (Cas9) from Streptococcus pyogenes, in combination with a short guide RNA (gRNA) to target the nuclease to a specific DNA sequence (Cong et al., 2013; Jinek et al., 2012; Jinek et al., 2013; Mali et al., 2013). CRISPR/Cas9 relies on simple base-pairing rules between the target DNA and the engineered gRNA rather than protein-DNA interactions required by ZFNs and TALENs (Gaj et al., 2013; Wei et al., 2013). As a result, the CRISPR/Cas9 system has proven extremely simple and flexible. Perhaps most important, this system has achieved highly efficacious alteration of the genome in a number of cell types and organisms (Ding et al., 2013; Hwang et al., 2013; Niu et al., 2014; Wang et al., 2013; Wei et al., 2013).

[0238] Given the importance of the hematopoietic system in cell-based gene therapies, we tested the CRISPR/Cas9 system in primary human CD4+ T cells and CD34+ hematopoietic stem and progenitor cells (HSPCs) targeting two clinically relevant genes, beta-2 microglobulin (B2M) and chemokine receptor 5 (CCR5). B2M encodes the accessory chain of major histocompatibility complex (MHC) class I molecules and is required for their surface expression (Bjorkman et al., 1987; Zijlstra et al., 1990). Deletion of B2M is a well-established strategy to ablate MHC class I surface expression (Riolobos et al., 2013), and could be used to generate hypoimmunogenic cells for transplantation and adoptive immunotherapy. CCR5 is the main co-receptor used by CCR5-tropic strains of HIV-1 (Trkola et al., 1996) and a validated target for gene ablation, as mutations resulting in loss of protein expression or haploinsufficiency protect against HIV infection (Catano et al., 2011; Hutter et al., 2009; Martinson et al., 1997; Samson et al., 1996). Moreover, transplantation of CCR5 homozygous mutant HSPCs provides long-term protection against HIV rebound even after discontinuation of antiretroviral therapy (Allers et al., 2011; Hutter et al., 2009). Several attempts have been made to target CCR5 in T cells (Perez et al.,2008; Tebas et al., 2014) and HSPCs (Holt et al., 2010; Schleifman et al., 2011) though the efficiency of gene targeting was not sufficient to protect against viral recrudescence (Tebas et al., 2014). Recently, CCR5 has been targeted using CRISPR/Cas9 in cell lines (Cho et al.,2013) and iPS cells (Ye et al., 2014). However, CRISPR/Cas9 gene editing in primary human hematopoietic cells remains untested. Here we report that use of CRISPR/Cas9 with single gRNAs led to highly efficient CCR5 ablation in CD34+ HSPCs but not B2M in CD4+ T cells. Employing a dual gRNA approach improved gene deletion efficacy in both cell types with biallelic inactivation frequencies reaching 34% for B2M in CD4+ T cells, and 42% for CCR5 in CD34+ HSPCs. Importantly, CRISPR/Cas9 CCR5-edited CD34+ HSPCs retained multi-lineage potential in vitro and in vivo upon xenotransplantation. Deep target capture sequencing of predicted on- and off-target sites in CD34+ HSPCs revealed highly efficacious on-target mutagenesis, and exceedingly low off-target mutagenesis.

[0239] The inventors designed gRNAs to target Cas9 to the B2M gene (FIG. 5A). Each guide was first tested for the ability to direct site-specific mutations in HEK293T cells. Using flow cytometry we measured the efficiency of each gRNA to direct Cas9-mediated ablation of B2M surface expression 72 hours post-transfection (FIG. 5B). We observed that B2M was abrogated in ˜7% (±1.02 SEM, n=3) to 48% (±1.80 SEM, n=3) of HEK293T cells depending upon the gRNA utilized (FIG. 5C and FIG. 6A). Similar results were observed using the Surveyor assay, with gRNA-specific mutation frequencies of 0-26% in HEK293T cells (FIG. 6B). The inventors also designed gRNAs to target Cas9 to the CCR5 gene (FIG. 5D). Upon introducing these into K562 cells, we measured targeting efficacy using the Surveyor assay and observed mutation frequencies ranging from 22-40% (FIG. 5E). Variation in the efficiency with which a specific gRNA directed Cas9-mediated ablation was observed, even between gRNAs targeting the same exon or nearly overlapping sites (FIG. 5A-E) indicating that on-target efficiency of site directed mutation is highly gRNA dependent as previously noted (Hsu et al., 2013).

[0240] Next, we tested selected single gRNAs in CD4⁺ T cells and CD34⁺ HSPCs. Surprisingly, gRNAs that were highly efficacious at targeting B2M in HEK293T cells exhibited lower targeting efficiencies in primary CD4⁺ T cells ranging from 1.4% (±0.2 SEM, n=6) to 4.7% (±0.9 SEM, n=6) ablation of B2M expression (FIG. 5F and FIGS. 6C-D) or 3-11% using the Surveyor assay (FIGS. 6B and 6E). For instance, crB2M_13 exhibited more than 10-fold reduced efficacy in CD4⁺ T cells (4.7%±0.9) as compared to HEK293T cells (48.0%±1.8) (FIGS. 5F and 6C). Interestingly, single gRNAs targeting CCR5 showed comparably mutation frequencies in CD34+ HSPCs as observed in K562 cells (FIGS. 5E and 5G). To explore this further we performed direct Sanger sequencing of several hundred colonies derived from HSPC clones targeted with crCCR5_A or crCCR5_B from two donors and observed very high mutation frequencies in all cases (FIG. 5H). As only cells expressing Cas9 were analyzed, it is unlikely that differences in on-target mutation efficiency were due to differential transfection efficiencies, although we cannot rule out differential transfection of individual guides, but rather may reflect intrinsic properties of certain primary hematopoietic cell types.

[0241] The inventors reasoned that using two gRNAs directed against the same locus might generate predictable mutations (deletions) more frequently than that achieved by error-prone non-homologous end joining (NHEJ), which represents the predominant DNA double strand break (DSB) repair pathway in HSPCs (Beerman et al., 2014). Indeed, this approach has previously been utilized for ZFNs, TALENs and the CRISPR/Cas9 system to achieve predictable deletions (Bauer et al.,2013; Canver et al., 2014; Gupta et al., 2013; Lee et al., 2010; Wang et al., 2014; Zhou et al.,2014). Six dual gRNA combinations targeting B2M with DNA sequence lengths between their predicted Cas9 cleavage sites ranging from 81 to 2261 nucleotides were introduced in CD4+ T cells together with Cas9 (FIG. 7A). We observed a trend of improved targeting efficacy for most of the tested gRNA pairs and greatly improved efficacy for one gRNA pair (crB2M_13+8), which resulted in 18.0% (±8.35 SEM, n=3) ablation of B2M surface expression (FIGS. 7B, 7C and 8A). B2M ablation led to a concomitant reduction of MHC class I cell surface expression (FIG. 8B). The inventors further interrogated mutation frequency at a clonal level via single-cell quantitative PCR (qPCR), which revealed 28.2% (n=301 cells analyzed) of CD4+ T cells were homozygous null for B2M (FIG. 8C). Upon Sanger sequencing across the predicted Cas9 cutting sites we observed deletion of the intervening sequence (FIG. 8D).

[0242] The inventors next applied the dual guide strategy to primary CD34+ HSPCs by introducing three gRNA pairs along with Cas9 (FIG. 7D). Sorted CD34+ HSPCs expressing Cas9 were plated into methylcellulose and emergent clonal colonies were picked two weeks post-plating for analysis. Individual colonies were analyzed by PCR to quantify the deletion efficacy of CCR5 (FIGS. 7D and 7E). Remarkably, although variation in CCR5 ablation was noted among different donors and gRNA pairs, we consistently observed high monoallelic and biallelic inactivation of CCR5 in all cases (FIGS. 7E and 8E). For example, one dual gRNA combination (crCCR5_D+Q) generated biallelic CCR5 deletion in CD34+ HSPCs at a rate of 26.8% (±7.1 SEM) across 4 donors (FIGS. 7E and 8E). It should be noted however that the mutation rates determined by this PCR strategy underestimate actual mutation frequency since small insertions or deletions (InDels) are not detected by this approach. A similar dual gRNA approach targeting CCR5 (crCCR5_A+B) in CD4+ T cells resulted in a biallelic inactivation rate of 8.8% at the single cell level (n=363 cells analyzed) (FIG. 8F). Again, after Sanger sequencing we noted excision of the DNA between the Cas9 cleavage sites (FIG. 8G). Taken together, these data demonstrate that highly efficacious ablation of clinically relevant genes can be achieved in primary hematopoietic CD4+ T cells and CD34+ HSPCs using a dual gRNA strategy.

[0243] In order to determine whether CD34+ HSPCs that had undergone genome editing with CRISPR/Cas9 retained their potential to differentiate into effector cells, we performed in vitro and in vivo differentiation assays. Towards this CCR5-edited CD34+ HSPCs were plated in methylcellulose and clonal colonies that emerged two weeks post-plating were counted and scored for contribution to granulocyte, macrophage, erythrocyte and megakaryocyte lineages. Comparable colony numbers and colony types were observed regardless of whether single, dual or no gRNAs were used demonstrating that CD34+ HSPC colony forming potential was not impacted by CRISPR/Cas9 (FIG. 10A) despite the high CCR5 mutation frequencies observed in these experiments (FIGS. 5H and 7E).

[0244] The inventors next tested the in vivo reconstitution potential of HSPCs following CRISPR/Cas9 targeting of CCR5 by xenotransplantation of control (Cas9-only), and CCR5-edited (Cas9+crCCR5 D+Q) CD34⁺ HSPCs into NOD-Prkdc^{Scid}-IL2rγ^{null} (NSG) recipients. Recipients were sacrificed at 12 weeks post-transplantation and human hematopoietic cell engraftment (hCD45+) was examined in the bone marrow revealing CD19+ lymphoid cells and CD11b+ myeloid cells (FIG. 10B). Human CD45+ hematopoietic cells were also found in the peripheral blood (data not shown) and in the spleens of transplanted mice (FIG. 10C). PCR analysis on DNA isolated from sorted human CD45+ hematopoietic cells from reconstituted mice demonstrated that CCR5 edited cells ( [symbol] CCR5) robustly contributed to human hematopoietic cell chimerism (FIG. 10D). Taken together these results demonstrate that CRISPR/Cas9 CCR5-edited CD34+ HSPCs retained multi-lineage potential in vitro and in vivo.

[0245] CRISPR/Cas9 has previously been shown to generate off-target mutations depending upon experimental setting and cell type (Cho et al., 2014; Cradick et al., 2013; Fu et al., 2013; Fu et al., 2014; Hruscha et al., 2013; Lin et al., 2014). To examine this we performed target capture sequencing of CD34+ HSPCs subjected to CRISPR/Cas9 CCR5-editing. These experiments captured each gRNA target site (n=5) and predicted off-target sites (n=126) with expanded capture intervals of 500 base pairs flanking each site to ensure accurate detection of any genetic lesion occurring at or near the selected sites (FIG. 11A). The inventors have previously shown that this approach can also identify structural variations, such as translocations and inversions, in proximity to the capture site (Talkowski et al., 2011). Sorted CD34+HSPCs treated with Cas9 alone or in combination with multiple single or dual gRNA combinations were sequenced to a mean target coverage of 3,390× across each 23 bp gRNA sequence and PAM (range 379.6×-7,969.5×) (FIG. 11B). Analysis of these data revealed highly efficacious on-target mutagenesis with a diverse array of mutated sequence variants observed in both single and dual gRNA treatments (FIG. 11C). As expected, we detected small InDels of up to 10 bp in addition to single nucleotide substitutions at the predicted target sites in single gRNA conditions. Strikingly, in each dual gRNA experiment, no fewer than 15 alternate mutant alleles were observed at either one of the gRNA sites (FIGS. 13-15). Notably, the sequencing depth of our analysis permitted estimation of mutation frequency for each particular variant, including mutations that were observed in only a few hundredths of a percent of the sample sequenced (FIG. 16). Predicted deletions (i.e. deletions between the two Cas9 target sites) were the most common mutations observed (crCCR5_A+B: 19.95%; crCCR5_C+D: 20.45%; crCCR5_D+ 42.13%), while small InDels (crCCR5_A+B: 3.06%; crCCR5_C+D: 0.50%; crCCR5_D+Q: 2.95%) were also frequent (FIG. 11C). Interestingly, for two combinations, crCCR5_A+B and crCCR5_D+Q, the inventors also observed inversions between the predicted Cas9 cleavage sites (crCCR5_A+B: 3.06%; crCCR5_D+Q: 2.48%). The most efficacious combination crCCR5_D+Q led to mutations in approximately 48% of the captured sequence reads (FIG. 11C).

[0246] We next examined the capture sequence reads at predicted off-target sites in the genome. An N-fold enrichment analysis was performed, wherein we compared the total number of non-reference sequencing reads at each predicted off-target site in gRNA treated and control (Cas9 only) samples. This analysis generated a ratio where 1.0 indicates an equivalent number of non-reference sequence reads in both treated and control samples, values less than 1.0 indicate fewer non-reference reads in treated samples, and values greater than 1.0 indicate a greater number of non-reference reads in treated samples (FIG. 11D). This analysis found that the mean enrichment of mutations at off-target sites in all the gRNA-treated samples compared to control closely conformed to the null hypothesis (i.e., 0.99-fold enrichment compared to controls) indicating that off-target mutation events were extremely rare. Indeed, statistical evaluation of all captured off-target sites yielded a single site ( 1/126; 0.6%, FIG. 11D) in the sample treated with crCCR5_B alone that passed multiple test correction for a statistically significant enrichment for off-target InDels versus controls (p≤7.6×10⁻¹¹). When the inventors scrutinized the sequencing reads from this site, which was located in the highly homologous CCR2 gene (FIG. 9A), we found that all sequence variants (36 out of 5,963 total reads) were one or two base InDels, (FIG. 9B). Of note, the other sample in which crCCR5_B was used (in combination with crCCR5_A) only 13 out of 5,339 reads supported mutation, however these events did not meet statistical significance above controls (FIG. 9B). Thus, off-target mutagenesis was exceedingly rare and moreover, the use of two gRNAs in combination did not increase the very low incidence of off-target mutagenesis. The inventors also performed analyses for structural variation at all sites and though we could readily detect on-target inversions in crCCR5_A+B and crCCR5_D+Q treatments, there was no evidence for inversion or translocation at any off-target sites in any condition. These data indicate that on-target mutagenesis efficiency was very high, and further that off-target mutagenesis was extremely infrequent for both single and dual gRNA treatments.

[0247] In this study the inventors utilized the CRISPR/Cas9 system in human primary CD4⁺ T cells and CD34⁺ HSPCs to target two clinically relevant genes B2M and CCR5. Surprisingly, the activity of the CRISPR/Cas9 system was remarkably variable in different human cell types, with the same gRNA exhibiting highly efficacious on target mutagenic activity in HEK293T cells but little activity in CD4+ T cells. In contrast, the targeting efficacy in K562 cells and CD34+ HSPCs was comparable. Moreover, consistent with previous reports (Hsu et al., 2013) the inventors observed that the efficiency of the CRISPR/Cas9 system was gRNA specific, as even gRNAs with partially overlapping sequences within the same exon displayed significantly different targeting efficiencies. Further, a dual gRNA approach yielded increased gene ablation efficacy in both CD4⁺ T cells and CD34⁺ HSPCs leading to predicted deletions at the targeted loci.

[0248] The lack of CRISPR/Cas9 activity observed in T cells especially with single gRNAs may be due to a number of factors including, inefficient plasmid DNA delivery, the innate immune response of T cells to foreign nucleic acid (Monroe et al., 2014), and/or active DNA repair machinery. Given the efficacy of the CRISPR/Cas9 system in a wide variety of cell types and species both in vitro and in vivo (Sander and Joung, 2014), the lack of activity observed in T cells is likely the exception and not the rule. Nonetheless, the results highlight that CRISPR/Cas9 targeting efficacy can differ between cell lines and primary cells.

[0249] The mutational analysis revealed highly efficacious mutagenesis of on-target sites in CD34+ HSPCs. Single gRNAs generated a range of mutations with the vast majority comprised of small InDels. In contrast, dual gRNA combinations largely led to predicted deletions though a diverse array of mutations including InDels and even inversions were detected. Importantly, we only identified one statistically significant off-target site in the highly homologous CCR2 gene, which occurred in one out of 6 experimental settings (gRNA crCCR5_B alone). Sequence analysis of crCCR5_B in comparison to the identified off-target site in CCR2 indicated that it perfectly matched in the seed region and contained 3 sequence mismatches at the 5′ end of the gRNA sequence (positions 1, 4 and 6). This data is consistent with previous studies showing that mismatches in the 5′ proximal end of the gRNA are tolerated by Cas9 (Lin et al., 2014; Wu et al., 2014). Our data support the idea that judicious guide design is critical for minimizing off-target mutations. Of note, our very deep sequencing analysis enabled detection of the lone off-target event, whereas analysis performed at lower sequencing depth—such as 50× coverage used in previous studies (Smith et al., 2014; Suzuki et al., 2014; Veres et al., 2014)—would have been unable to detect this event. Overall, our analysis of CRISPR/Cas9 mutational activity in CD34+ HSPCs revealed very high on-target mutation rates and extremely low incidence of off-target mutagenesis.

[0250] The ability to direct efficient and predictable deletions using dual gRNAs opens the possibility of using this strategy to target non-coding regions in the genome such as enhancers and silencers that control expression of disease relevant genes. For example, recent studies have identified regulatory regions that control expression of fetal hemoglobin (Bauer et al., 2013), which if deleted increase fetal globin expression in cells otherwise restricted to expressing adult E-globin (Bauer et al., 2013; Xu et al., 2011). Targeted deletion of such regions in CD34+ HSPCs followed by transplantation into patients may provide a durable therapy for the treatment of β-hemoglobinopathies such as sickle cell anemia and β-thalassemia (Xu et al., 2011). Overall, the data demonstrate that CRISPR/Cas9 can be used to ablate genes of clinical significance in CD4+ T cells and CD34+ HSPCs with an efficiency that is therapeutically meaningful for a number of clinical settings, such as the treatment of HIV. Our demonstration that CRISPR/Cas9 targeted CD34+ HSPCs retain multi-lineage potential in vitro and in vivo, combined with very high on-target and minimal off target mutation rates suggests that CRISPR/Cas9 could have broad applicability enabling gene and cell-based therapies of the blood.

### Some Experimental Procedures

### Transfection of Cells

[0251] Human primary CD4⁺ T cells and CD34⁺ HSPCs were transfected with Cas9-2A-GFP and gRNA encoding plasmids using respective Amaxa Nucelofection kits using cell-specific Nucleofection program with Nucleofector II device.

### Surveyor Assays

[0252] Amplicons spanning the different targeted regions were PCR amplified using the Phusion polymerase and HF Buffer (New England Biolabs) and CEL assay was carried out using the Surveyor Mutation detection kit (Transgenomic) as per manufacturer's instructions.

### In Vivo Transplantation of CD34⁺ HSPCs

[0253] 75,000-sorted CD34+ HSPCs expressing Cas9 alone (control group, n=2) or Cas9 with crCCR5_D+Q gRNAs (experimental group, n=5) were transplanted in to NSG recipient mice. At 12 weeks post-transplantation, all mice were euthanized and blood, bone marrow, and spleen samples were taken for characterization of human hematopoietic cell chimerism. Human CD45+ cells were sorted for DNA isolation and analysis of CCR5 deletion.

### Off-Target Prediction and Capture Sequencing

[0254] Each guide RNA target site (n=5) and predicted off-target site (n=126) was selected for capture sequencing (FIG. 12) using the Agilent SureSelectXT Target Enrichment System. Capture Sequencing was performed as described earlier (Talkowski et al., 2011).

### Molecular Biology

[0255] We subcloned a human-codon-optimized Cas9 gene with a C-terminal nuclear localization signal (Mali et al., 2013) into a CAG expression plasmid with 2A-GFP (Ding et al., 2013). The guide RNAs (gRNAs) were separately expressed from a plasmid with the human U6 polymerase III promoter (Mali et al., 2013). Each gRNA sequence was introduced in this plasmid using BbsI restriction sites. All guides were designed using the online optimized design tool at http://crispr.mit.edu. gRNA and primer sequences are enlisted under List of reagents at the end of experimental procedures.

### Primary Blood Cell Isolation

[0256] Primary CD4+ T cells were isolated from peripheral blood (Leukopacs, MGH) using RosetteSep CD4+ T cell enrichment cocktail (STEMCELL Technologies). CD34+ cells from G-CSF mobilized peripheral blood were purchased from AllCells.

### Cell Culture

[0257] HEK293T, K562 and T cells were cultured in RPMI-1640 medium supplemented with 10% FBS. CD34+ HSPCs were cultured in DMEM/F12 medium supplemented with 10% FBS, β-mercaptoethanol, GlutaMax, Pencillin-Streptomycin, minimum non-essential amino acid and human cytokine cocktails (GM-CSF, SCF, TPO, Flt3 ligand, IL3, IL6). Cell lines were passaged every 3-4 days.

### Transfection of Cells

[0258] Human primary CD4+ T cells and CD34+ HSPCs were transfected with Cas9-2A-GFP and gRNA encoding plasmids using respective Amaxa Nucelofection kits (Human CD34 cell Nucleofector kit #VPA-1003 for CD34+ HSPCs, Human T cell Nucleofector kit #VPA-1002 for CD4+ T cells, and Cell Line Nucleofector kit V #VCA-1003 for K562 cells) and cell-specific Nucleofection program (U-008 for CD34+HSPCs, U-014 for CD4+ T cells, and T-016 for K562 cells) with an Amaxa Nucleofection II device as per manufacturer's instructions with minor modifications. HEK293T cells were seeded in 6-well plates the day before transfection and transfected using Fugene 6 (Promega). For dual gRNA combinations in CD34+ HSPCs, individual gRNAs were used at half the amount of single gRNA conditions, keeping total gRNA amount the same across the experimental settings.

### Cell Sorting

[0259] For the CCR5 targeting experiments in CD34+ HSPCs, cells were thawed and cultivated for 6-8 hours in complete DMEM/F12 medium prior to transfection. Following transfection, cells were plated in antibiotic free medium. 24 hours post-transfection, cells were harvested in sample medium (2% FBS and 2 mM EDTA in PBS without Ca²⁺ and Mg²⁺) and HSPCs were stained with anti-CD34-PE/Cy7 (clone: 581, Biolegend, 1:100) for 20 min on ice. Live, GFP+ CD34+ HSPCs were sorted using an Aria II sorter (BD Bioscience) and plated in complete DMEM/F12 medium supplemented with human cytokine cocktail and culture for 72 hours prior to analysis. For the B2M experiments, cells were stained with mouse monoclonal anti-B2M-APC antibody (clone: 2M2, Biolegend) 48 or 72 hours post-transfection to estimate loss of B2M expression.

[0260] FACS data were analyzed using FlowJo software.

### Colony Forming Cell (CFC) Assay

[0261] 1500 sorted CD34+ HSPCs were plated in 1.5 ml of methylcellulose (MethoCult™ H4034 Optimum, Stem Cell Technologies) on a 35 mm cell culture dish and cultured for two weeks at 37° C. in a 5% CO2 incubator. Colonies were then counted and scored.

### Surveyor/CEL Assay

[0262] Amplicons spanning the different targeted regions were PCR amplified using the Phusion polymerase and HF Buffer (New England Biolabs) and CEL assay was carried out using the Surveyor Mutation detection kit (Transgenomic) according to the manufacturer's instructions, with minor modifications.

### Clonal Analysis

[0263] Colonies grown in MethoCult™ H4034 Optimum were individually picked and lysed in 50 μl of lysis buffer containing detergent and Proteinase K buffer (van der Burg et al., 2011). Samples were digested at 56° C. for 1 h followed by Proteinase K inactivation at 95° C. for 15 min. 50 μl of water with RNase A were added to the samples. 2 μl of samples were use for PCR. A 436 bp amplicon spanning the targeted region was PCR amplified using GoTaq® Green Master Mix (Promega) as per manufacturer's instructions. For single gRNA experiments, PCR products were analyzed by Sanger sequencing (Macrogen). For dual gRNA experiments, PCR products were analyzed by agarose gel electrophoresis.

### In Vivo Transplantation of CD34+HSPCs

[0264] NOD/SCID/IL2Rγ^{-/-} (NSG) mice (The Jackson Laboratory) were housed in a pathogen-free facility, maintained in microisolator cages, and fed autoclaved food and water. Adult (6-8 weeks of age) NSG mice were conditioned with sub-lethal (2 Gy) whole-body irradiation. The conditioned recipients were transplanted with 75,000-sorted CD34+ HSPCs expressing Cas9 alone (control group, n=2) or Cas9 with crCCR5_D+Q gRNAs (experimental group, n=5). At 12 weeks post-transplantation, all mice were euthanized and blood, bone marrow, and spleen samples were taken for characterization of human hematopoietic cell chimerism. Human CD45+ cells were sorted for DNA isolation and analysis of CCR5 deletion.

### Single Cell PCR Assay

[0265] 48 h after electroporation with Cas9 and different gRNA combinations, GFP+ primary CD4+ T cells were sorted into 384-well plates (Twin tec skirted PCR plate, Eppendorf) containing 4 μl of prepGEM Tissue (ZyGEM) per well. Cells were lysed and digested following the manufacturer's instructions to release the genomic DNA. A multiplexed nested PCR was then carried out in the same plate with the primer combinations represented in FIGS. 8C and 8F. The resulting DNA was then used in two subsequent PCR reactions, one amplifying a positive control region, to determine successful genomic DNA isolation from a single cell, and another one amplifying a region lying between the two gRNA binding sites, allowing us to quantify the percentage of cells homozygous for the dual gRNA induced deletion (FIGS. 8D and 8G). Cells were scored based on the melting curves of the PCR amplicons. PCR reactions were performed using an Applied Biosystems ViiA 7 real-Time PCR System (Life Technologies).

### Off-Target Prediction and Capture Sequencing

[0266] Degenerate gRNA off-target sequences were predicted for each gRNA targeting CCR5 using the CRISPR Design off-target prediction tool (Hsu et al., 2013). Off-target sequences were further supplemented by alignment of each gRNA to the human genome using BOWTIE of which all results up to and including 3 mismatches were added to the total off-target list (Langmead et al., 2009). All instances of each predicted off-target sequence existent in the human genome reference build GRCh37v71 were recorded. Each guide RNA target site (n=5) and predicted off-target site (n=126) was selected for capture sequencing using the Agilent SureSelectXT Target Enrichment System. Capture intervals were expanded by approximately 500 bp in both the 5′ and 3′ directions to ensure exhaustive capture of the targeted region and detection of any genetic lesion occurring at or near a predicted gRNA on- or off-target site, as we have previously shown accurate capability to detect translocations and inversions using targeted capture of probes in proximity to a rearrangement breakpoint using a CapBP procedure as described (Talkowski et al.,2011). Probes were tiled with 60-fold greater density over each predicted 23 bp on- or off-target gRNA binding site than the flanking kilobase of sequence. Isogenic CD34+ HSPCs-mPB were transfected with CRISPR/Cas9 plasmids (one Cas9 only-treated control group, three treatment groups transfected with a single gRNA, and three treatment groups transfected with dual gRNAs). Sorted CD34+ genome edited HSPCs were cultured for two weeks prior to DNA isolation. Capture libraries were prepared from DNA extracted from seven treatment groups. Capture libraries were sequenced as 101 bp paired-end reads on an Illumina HiSeq2000 platform.

### NGS Data Processing and Computational Analysis

[0267] Read pairs were aligned to GRCh37v71 with Bwa-MEM v0.7.10-r789 (Li, arXiv 2013). Alignments were processed using PicardTools and SAMBLASTER (Faust and Hall, 2014). The Genome Analysis Toolkit (GATK) v3.1-1-g07a4bf8 was applied for base quality score recalibration, insertion/deletion (InDel) realignment, duplicate removal, and single nucleotide variant (SNV) and InDel discovery and genotyping per published best-practice protocols (McKenna et al, Genome Res 2010; DePristo et al, Nat Genet 2011; Van der Auwera et al, 2013). SNVs and InDels were annotated using ANNOVAR (Wang et al., 2010). Structural variants (SVs) were detected with LUMPY v0.2.5 considering both anomalous pair and split read evidence at a minimum call weight threshold of 7 and an evidence set score ≤0.05 (Layer et al., 2014). Candidate copy number variants (CNVs) were further statistically assessed by Student's t-test for a concomitant change in depth of coverage across the putative CNV. As a final exhaustive measure, each on- and off-target site was manually scrutinized in each capture library for evidence supporting predictable mutagenesis that is not detectable by the computational algorithms due to low levels of mosaicism in the sequenced population.

### Evaluation of Off-Target Mutation Frequency

[0268] A statistical framework was developed to assess off-target mutational burden for each gRNA. For each off-target site (n=126), all reads with at least one nucleotide of overlap with that 23 bp off-target site were collected and their CIGAR information was tabulated into categories as follows: reads representing small InDels (CIGAR contains at least one “I” or “D”), reads potentially representative of other rearrangements (CIGAR contains at least one “S” or “H”), and reads reflecting reference sequence (CIGAR did not match either of the two former categories). Such counts were gathered at all 126 sites in all seven libraries and were further pooled to form comparison groups of “treatment” libraries (transfected gRNA matches corresponding off-target site gRNA) and “control” libraries (transfected gRNA does not match corresponding off-target site gRNA). Next, at each off-target site, relative n-fold enrichment of each read classification between treatment and control libraries was evaluated. Finally, a one-tailed Fisher's Exact Test was performed to assess the statistical significance of enrichment of variant reads in treatments versus controls at each off-target site, followed by Bonferroni correction to retain an experiment-wide significance threshold of α=0.05.

### List of Reagents

TABLE 1
PCR primers used for CEL assay

| | | |
|---|---|---|
| Fw: CCR5_CEL_F | CTGCAAAAGGCTGAAGAGCA (SEQ ID NO: 24) | For all guides |
| Rev: CCR5_CEL_R | CCCCAAGATGACTATCTTTAATGTC (SEQ ID NO: | targeting |
| | 25) | CCR5 |
| Fw: Le277 | CTGGCTTGGAGACAGGTGAC (SEQ ID NO: 26) | For crB2M_6 |
| Rev: Le679 | GACGCTTATCGACGCCCTAA (SEQ ID NO: 27) | and |
| | | crB2M_13 |
| Fw: Le680 | CAAAATCTTGCCGCCTTCCC (SEQ ID NO: 28) | For crB2M_8 |
| Rev: Le681 | ACTTTCCAAAATGAGAGGCATGA (SEQ ID NO: | |
| | 29) | |
| Fw: Le682 | CCAGAGTGGAAATGGAATTGGGA (SEQ ID NO: | For crB2M_10 |
| | 30) | |
| Rev: Le683 | ACTCATACACAACTTTCAGCAGCTT (SEQ ID NO: | |
| | 31) | |
| Fw: Le684 | TCATGGGTAGGAACAGCAGC (SEQ ID NO: 32) | For crB2M_12 |
| Rev: Le685 | TCTCCTCAGCAGAGATGTCC (SEQ ID NO: 33) | |

### REFERENCES

[0269] 1. Allers, K., Hutter, G., Hofmann, J., Loddenkemper, C., Rieger, K., Thiel, E., and Schneider, T. (2011). Evidence for the cure of HIV infection by CCR5Delta32/Delta32 stem cell transplantation. Blood 117, 2791-2799.
[0270] 2. Bauer, D.E., Kamran, S.C., Lessard, S., Xu, J., Fujiwara, Y., Lin, C., Shao, Z., Canver, M.C., Smith, E.C., Pinello, L., et al. (2013). An erythroid enhancer of BCL11A subject to genetic variation determines fetal hemoglobin level. Science 342, 253-257.
[0271] 3. Beerman, I., Seita, J., Inlay, M.A., Weissman, I.L., and Rossi, D.J. (2014). Quiescent Hematopoietic Stem Cells Accumulate DNA Damage during Aging that Is Repaired upon Entry into Cell Cycle. Cell stem cell.
[0272] 4. Bjorkman, P.J., Saper, M.A., Samraoui, B., Bennett, W.S., Strominger, J.L., and Wiley, D.C. (1987). Structure of the human class I histocompatibility antigen, HLA-A2. Nature 329, 506-512.
[0273] 5. Canver, M.C., Bauer, D.E., Dass, A., Yien, Y.Y., Chung, J., Masuda, T., Maeda, T., Paw, B.H., and Orkin, S.H. (2014). Characterization of Genomic Deletion Efficiency Mediated by Clustered Regularly Interspaced Palindromic Repeats (CRISPR)/Cas9 Nuclease System in Mammalian Cells. The Journal of biological chemistry 289, 21312-21324.
[0274] 6. Catano, G., Chykarenko, Z.A., Mangano, A., Anaya, J.M., He, W., Smith, A., Bologna, R., Sen, L., Clark, R.A., Lloyd, A., et al. (2011). Concordance of CCR5 genotypes that influence cell-mediated immunity and HIV-1 disease progression rates. The Journal of infectious diseases 203, 263-272.
[0275] 7. Cho, S.W., Kim, S., Kim, J.M., and Kim, J.S. (2013). Targeted genome engineering in human cells with the Cas9 RNA-guided endonuclease. Nature biotechnology 31, 230-232.
[0276] 8. Cho, S.W., Kim, S., Kim, Y., Kweon, J., Kim, H.S., Bae, S., and Kim, J.S. (2014). Analysis of off-target effects of CRISPR/Cas-derived RNA-guided endonucleases and nickases. Genome research 24,132-141.
[0277] 9. Cong, L., Ran, F.A., Cox, D., Lin, S., Barretto, R., Habib, N., Hsu, P.D., Wu, X., Jiang, W., Marraffini, L.A.,et al. (2013). Multiplex genome engineering using CRISPR/Cas systems. Science 339, 819-823.
[0278] 10. Cradick, T.J., Fine, E.J., Antico, C.J., and Bao, G. (2013). CRISPR/Cas9 systems targeting beta-globin and CCR5 genes have substantial off-target activity. Nucleic acids research 41, 9584-9592.
[0279] 11. Ding, Q., Regan, S.N., Xia, Y., Oostrom, L.A., Cowan, C.A., and Musunuru, K. (2013). Enhanced efficiency of human pluripotent stem cell genome editing through replacing TALENs with CRISPRs. Cell stem cell 12, 393-394.
[0280] 12. Fu, Y., Foden, J.A., Khayter, C., Maeder, M.L., Reyon, D., Joung, J.K., and Sander, J.D. (2013). High-frequency off-target mutagenesis induced by CRISPR-Cas nucleases in human cells. Nature biotechnology 31, 822-826.
[0281] 13. Fu, Y., Sander, J.D., Reyon, D., Cascio, V.M., and Joung, J.K. (2014). Improving CRISPR-Cas nuclease specificity using truncated guide RNAs. Nature biotechnology 32, 279-284.
[0282] 14. Gaj, T., Gersbach, C.A., and Barbas, C.F., 3rd (2013). ZFN, TALEN, and CRISPR/Cas-based methods for genome engineering. Trends in biotechnology 31, 397-405.
[0283] 15. Gupta, A., Hall, V.L., Kok, F.O., Shin, M., McNulty, J.C., Lawson, N.D., and Wolfe, S.A. (2013). Targeted chromosomal deletions and inversions in zebrafish. Genome research 23, 1008-1017.
[0284] 16. Holt, N., Wang, J., Kim, K., Friedman, G., Wang, X., Taupin, V., Crooks, G.M., Kohn, D.B., Gregory, P.D., Holmes, M.C., et al. (2010). Human hematopoietic stem/progenitor cells modified by zinc-finger nucleases targeted to CCR5 control HIV-1 in vivo. Nature biotechnology 28, 839-847.
[0285] 17. Hruscha, A., Krawitz, P., Rechenberg, A., Heinrich, V., Hecht, J., Haass, C., and Schmid, B. (2013). Efficient CRISPR/Cas9 genome editing with low off-target effects in zebrafish. Development 140, 4982-4987.
[0286] 18. Hsu, P.D., Scott, D.A., Weinstein, J.A., Ran, F.A., Konermann, S., Agarwala, V., Li, Y., Fine, E.J., Wu, X., Shalem, O., et al. (2013). DNA targeting specificity of RNA-guided Cas9 nucleases. Nature biotechnology 31, 827-832.
[0287] 19. Hutter, G., Nowak, D., Mossner, M., Ganepola, S., Mussig, A., Allers, K., Schneider, T., Hofmann, J., Kucherer, C., Blau, O., et al. (2009). Long-term control of HIV by CCR5 Delta32/Delta32 stem-cell transplantation. The New England journal of medicine 360, 692-698.
[0288] 20. Hwang, W.Y., Fu, Y., Reyon, D., Maeder, M.L., Tsai, S.Q., Sander, J.D., Peterson, R.T., Yeh, J.R., and Joung, J.K. (2013). Efficient genome editing in zebrafish using a CRISPR-Cas system. Nature biotechnology 31, 227-229.
[0289] 21. Jinek, M., Chylinski, K., Fonfara, I., Hauer, M., Doudna, J.A., and Charpentier, E. (2012). A programmable dual-RNA-guided DNA endonuclease in adaptive bacterial immunity. Science 337, 816-821.
[0290] 22. Jinek, M., East, A., Cheng, A., Lin, S., Ma, E., and Doudna, J. (2013). RNA-programmed genome editing in human cells. Elife 2, e00471/
[0291] 23. Joung, J.K., and Sander, J.D. (2013). TALENs: a widely applicable technology for targeted genome editing. Nature reviews Molecular cell biology 14, 49-55.
[0292] 24. Lee, H.J., Kim, E., and Kim, J.S. (2010). Targeted chromosomal deletions in human cells using zinc finger nucleases. Genome research 20, 81-89.
[0293] 25 Lin, Y., Cradick, T.J., Brown, M.T., Deshmukh, H., Ranjan, P., Sarode, N., Wile, B.M., Vertino, P.M., Stewart, F.J., and Bao, G. (2014). CRISPR/Cas9 systems have off-target activity with insertions or deletions between target DNA and guide RNA sequences. Nucleic acids research 42, 7473-7485.
[0294] 26. Mali, P., Yang, L., Esvelt, K.M., Aach, J., Guell, M., DiCarlo, J.E., Norville, J.E., and Church, G.M. (2013).RNA-guided human genome engineering via Cas9. Science 339, 823-826.
[0295] 27. Martinson, J.J., Chapman, N.H., Rees, D.C., Liu, Y.T., and Clegg, J.B. (1997). Global distribution of the CCR5 gene 32-basepair deletion. Nature genetics 16, 100-103.
[0296] 28. Monroe, K.M., Yang, Z., Johnson, J.R., Geng, X., Doitsh, G., Krogan, N.J., and Greene, W.C. (2014). IFI16 DNA sensor is required for death of lymphoid CD4 T cells abortively infected with HIV. Science 343, 428-432.
[0297] 29. Niu, Y., Shen, B., Cui, Y., Chen, Y., Wang, J., Wang, L., Kang, Y., Zhao, X., Si, W., Li, W., et al. (2014). Generation of Gene-Modified Cynomolgus Monkey via Cas9/RNA-Mediated Gene Targeting in One-Cell Embryos. Cell 156, 836-843.
[0298] 30. Pan, Y., Xiao, L., Li, A.S., Zhang, X., Sirois, P., Zhang, J., and Li, K. (2013). Biological and biomedical applications of engineered nucleases. Molecular biotechnology 55, 54-62.
[0299] 31. Perez, E.E., Wang, J., Miller, J.C., Jouvenot, Y., Kim, K.A., Liu, O., Wang, N., Lee, G., Bartsevich, V.V., Lee, Y.L., et al. (2008). Establishment of HIV-1 resistance in CD4+ T cells by genome editing using zinc-finger nucleases. Nature biotechnology 26, 808-816.
[0300] 32. Riolobos, L., Hirata, R.K., Turtle, C.J., Wang, P.R., Gornalusse, G.G., Zavajlevski, M., Riddell, S.R., and Russell, D.W. (2013). HLA engineering of human pluripotent stem cells. Molecular therapy: the journal of the American Society of Gene Therapy 21, 1232-1241.
[0301] 33. Samson, M., Libert, F., Doranz, B.J., Rucker, J., Liesnard, C., Farber, C.M., Saragosti, S., Lapoumeroulie, C., Cognaux, J., Forceille, C., et al. (1996). Resistance to HIV-1 infection in caucasian individuals bearing mutant alleles of the CCR-5 chemokine receptor gene. Nature 382, 722-725.
[0302] 34. Sander, J.D., and Joung, J.K. (2014). CRISPR-Cas systems for editing, regulating and targeting genomes. Nature biotechnology 32, 347-355.
[0303] 35. Scharenberg, A.M., Duchateau, P., and Smith, J. (2013). Genome engineering with TAL-effector nucleases and alternative modular nuclease technologies. Current gene therapy 13, 291-303.
[0304] 36. Schleifman, E.B., Bindra, R., Leif, J., del Campo, J., Rogers, F.A., Uchil, P., Kutsch, O., Shultz, L.D., Kumar, P., Greiner, D.L., et al. (2011). Targeted disruption of the CCR5 gene in human hematopoietic stem cells stimulated by peptide nucleic acids. Chemistry & biology 18, 1189-1198.
[0305] 37. Silva, G., Poirot, L., Galetto, R., Smith, J., Montoya, G., Duchateau, P., and Paques, F. (2011).
[0306] 38. Meganucleases and other tools for targeted genome engineering: perspectives and challenges for gene therapy. Current gene therapy 11, 11-27.
[0307] 39. Smith, C., Gore, A., Yan, W., Abalde-Atristain, L., Li, Z., He, C., Wang, Y., Brodsky, R.A., Zhang, K., Cheng, L., et al. (2014). Whole-genome sequencing analysis reveals high specificity of CRISPR/Cas9 and TALEN-based genome editing in human iPSCs. Cell stem cell 15, 12-13.
[0308] 40. Suzuki, K., Yu, C., Qu, J., Li, M., Yao, X., Yuan, T., Goebl, A., Tang, S., Ren, R., Aizawa, E., et al. (2014).
[0309] 41. Targeted gene correction minimally impacts whole-genome mutational load in human-disease-specific induced pluripotent stem cell clones. Cell stem cell 15, 31-36.
[0310] 42. Talkowski, M.E., Ernst, C., Heilbut, A., Chiang, C., Hanscom, C., Lindgren, A., Kirby, A., Liu, S., Muddukrishna, B., Ohsumi, T.K., et al. (2011). Next-generation sequencing strategies enable routine detection of balanced chromosome rearrangements for clinical diagnostics and genetic research. American journal of human genetics 88, 469-481.
[0311] 43. Tebas, P., Stein, D., Tang, W.W., Frank, I., Wang, S.Q., Lee, G., Spratt, S.K., Surosky, R.T., Giedlin, M.A., Nichol, G., et al. (2014). Gene editing of CCR5 in autologous CD4 T cells of persons infected with HIV. The New England journal of medicine 370, 901-910.
[0312] 44. Trkola, A., Dragic, T., Arthos, J., Binley, J.M., Olson, W.C., Allaway, G.P., Cheng-Mayer, C., Robinson, J., Maddon, P.J., and Moore, J.P. (1996). CD4-dependent, antibody-sensitive interactions between HIV-1 and its co-receptor CCR-5. Nature 384, 184-187.
[0313] 45. Urnov, F.D., Rebar, E.J., Holmes, M.C., Zhang, H.S., and Gregory, P.D. (2010). Genome editing with engineered zinc finger nucleases. Nature reviews Genetics 11, 636-646.
[0314] 46. Veres, A., Gosis, B.S., Ding, Q., Collins, R., Ragavendran, A., Brand, H., Erdin, S., Talkowski, M.E., and Musunuru, K. (2014). Low incidence of off-target mutations in individual CRISPR-Cas9 and TALEN targeted human stem cell clones detected by whole-genome sequencing. Cell stem cell 15, 27-30.
[0315] 47. Wang, H., Yang, H., Shivalila, C.S., Dawlaty, M.M., Cheng, A.W., Zhang, F., and Jaenisch, R. (2013).
[0316] 48. One-step generation of mice carrying mutations in multiple genes by CRISPR/Cas-mediated genome engineering. Cell 153, 910-918.
[0317] 49. Wang, X., Wang, Y., Huang, H., Chen, B., Chen, X., Hu, J., Chang, T., Lin, R.J., and Yee, J.K. (2014). Precise gene modification mediated by TALEN and single-stranded oligodeoxynucleotides in human cells. PloS one 9, e93575.
[0318] 50. Wei, C., Liu, J., Yu, Z., Zhang, B., Gao, G., and Jiao, R. (2013). TALEN or Cas9—rapid, efficient and specific choices for genome modifications. Journal of genetics and genomics=Yi chuan xue bao 40, 281-289.
[0319] 51. Wu, X., Scott, D.A., Kriz, A.J., Chiu, A.C., Hsu, P.D., Dadon, D.B., Cheng, A.W., Trevino, A.E., Konermann, S., Chen, S., et al. (2014). Genome-wide binding of the CRISPR endonuclease Cas9 in mammalian cells. Nature biotechnology 32, 670-676.
[0320] 52. Xu, J., Peng, C., Sankaran, V.G., Shao, Z., Esrick, E.B., Chong, B.G., Ippolito, G.C., Fujiwara, Y., Ebert, B.L., Tucker, P.W., et al. (2011). Correction of sickle cell disease in adult mice by interference with fetal hemoglobin silencing. Science 334, 993-996.
[0321] 53. Ye, L., Wang, J., Beyer, A.I., Teque, F., Cradick, T.J., Qi, Z., Chang, J.C., Bao, G., Muench, M.O., Yu, J., et al. (2014). Seamless modification of wild-type induced pluripotent stem cells to the natural CCR5Delta32 mutation confers resistance to HIV infection. Proceedings of the National Academy of Sciences of the United States of America 111, 9591-9596.
[0322] 54. Zhou, J., Wang, J., Shen, B., Chen, L., Su, Y., Yang, J., Zhang, W., Tian, X., and Huang, X. (2014). Dual sgRNAs facilitate CRISPR/Cas9-mediated mouse genome targeting. The FEBS journal 281, 1717-1725.
[0323] 55. Zijlstra, M., Bix, M., Simister, N.E., Loring, J.M., Raulet, D.H., and Jaenisch, R. (1990). Beta 2-microglobulin deficient mice lack CD4-8+ cytolytic T cells. Nature 344, 742-746.
[0324] 56. Ding, Q., Lee, Y.K., Schaefer, E.A., Peters, D.T., Veres, A., Kim, K., Kuperwasser, N., Motola, D.L., Meissner, T.B., Hendriks, W.T., et al. (2013). A TALEN genome-editing system for generating human stem cell-based disease models. Cell stem cell 12, 238-251.
[0325] 57. Faust, G.G., and Hall, I.M. (2014). SAMBLASTER: fast duplicate marking and structural variant read extraction. Bioinformatics 30, 2503-2505.
[0326] 58. Hsu, P.D., Scott, D.A., Weinstein, J.A., Ran, F.A., Konermann, S., Agarwala, V., Li, Y., Fine, E.J., Wu, X., Shalem, O., et al. (2013). DNA targeting specificity of RNA-guided Cas9 nucleases. Nature biotechnology 31, 827-832.
[0327] 59. Langmead, B., Trapnell, C., Pop, M., and Salzberg, S.L. (2009). Ultrafast and memory-efficient alignment of short DNA sequences to the human genome. Genome biology 10, R25.
[0328] 60. Layer, R.M., Chiang, C., Quinlan, A.R., and Hall, I.M. (2014). LUMPY: a probabilistic framework for structural variant discovery. Genome biology 15, R84.
[0329] 61. Li H. (2013). Aligning sequence reads, clone sequences and assembly contigs with BWA-MEM. arXiv.
[0330] 62. Mali, P., Yang, L., Esvelt, K.M., Aach, J., Guell, M., DiCarlo, J.E., Norville, J.E., and Church, G.M. (2013). RNA-guided human genome engineering via Cas9. Science 339, 823-826.
[0331] 63. Talkowski, M.E., Ernst, C., Heilbut, A., Chiang, C., Hanscom, C., Lindgren, A., Kirby, A., Liu, S., Muddukrishna, B., Ohsumi, T.K., et al. (2011). Next-generation sequencing strategies enable routine detection of balanced chromosome rearrangements for clinical diagnostics and genetic research. American journal of human genetics 88, 469-481.
[0332] 64. Van der Auwera et al. (2013). From FastQ Data to High-Confidence Variant Calls: The Genome Analysis Toolkit Best Practices Pipeline. Current Protocols in Bioinformatics. 43:11.10.1-11.10.33.
[0333] 65. van der Burg, M., Kreyenberg, H., Willasch, A., Barendregt, B.H., Preuner, S., Watzinger, F., Lion, T., Roosnek, E., Harvey, J., Alcoceba, M., et al. (2011). Standardization of DNA isolation from low cell numbers for chimerism analysis by PCR of short tandem repeats. Leukemia 25, 1467-1470.
[0334] 66. Wang, K., Li, M., and Hakonarson, H. (2010). ANNOVAR: functional annotation of genetic variants from high-throughput sequencing data. Nucleic acids research 38, e164.

1.-49. (canceled)

50. A method for treating or preventing a disorder associated with expression of a polynucleotide sequence in a subject, the method comprising:
(a) altering a target polynucleotide sequence associated with the disorder in a cell or a population of cells ex vivo by contacting the polynucleotide sequence with a clustered regularly interspaced short palindromic repeats-associated (Cas) protein and at least one ribonucleic acid, wherein the ribonucleic acid directs Cas protein to and hybridizes to a target motif of the target polynucleotide sequence associated with the disorder, wherein the target polynucleotide sequence associated with the disorder is cleaved;
(b) altering a target B2M polynucleotide sequence in the cell or population of cells ex vivo by contacting the target B2M polynucleotide sequence with a clustered regularly interspaced short palindromic repeats-associated (Cas) protein and at least one ribonucleic acid selected from the group consisting of SEQ ID NOs: 9-23 and 419-2609; and
(c) introducing the cell or population of cells into the subject, thereby treating or preventing a disorder associated with expression of the polynucleotide sequence.

51. The method of claim 50, wherein the disorder is selected from the group consisting of a genetic disorder, an infection, and cancer.

52. The method of claim 50, wherein the disorder comprises HIV or AIDs.

53. The method of claim 50, further comprising altering one or more additional polynucleotide sequences in the cell ex vivo.

54. The method of claim 50, wherein the Cas protein comprises a Cas9 protein or a functional portion thereof.

55. The method of claim 50, wherein the Cas protein comprises a Cpf1 protein or a functional portion thereof.

56. The method of claim 50, wherein the cell or population of cells are selected from the group consisting of a stem cell, a pluripotent cell, a progenitor cells, a hematopoietic stem and/or progenitor cell, a CD34⁺ mobilized peripheral blood cell, a CD34+ cord blood cell, a CD34+ bone marrow cell, a CD34⁺CD38-Lineage-CD90⁺CD45RA⁻ cell, and a CD34+ hematopoietic stem and/or progenitor cell; a CD4+ T cell, a hepatocyte, a somatic cell, and a non-transformed cell.

57. The method of claim 50, wherein the at least one ribonucleic acid is selected from the group consisting of SEQ ID NO: 9, SEQ ID NO: 10, SEQ ID NO: 11, SEQ ID NO: 12, SEQ ID NO: 13, SEQ ID NO: 14, SEQ ID NO: 15, SEQ ID NO: 16, SEQ ID NO: 17, SEQ ID NO: 18, SEQ ID NO: 19, SEQ ID NO: 20, SEQ ID NO: 21, SEQ ID NO: 22, and SEQ ID NO: 23.

58. The method of claim 50, wherein the alteration of the target B2M polynucleotide sequence in the cell or population of cells results in the deletion of a contiguous stretch of genomic DNA, thereby eliminating surface expression of MHC Class I molecules in the cell or population of cells.

59. The method of claim 50, wherein the cell or population of cells are CD4+ T cells.

60. The method of claim 50, wherein the cell or population of cells are CD34+ cells.

The application's sequence listing, which the Patent Office published only in electronic form, follows.

SEQUENCE LISTING (2715 sequences)

SEQ ID NO: 1 - DNA, 2223 bp, Homo sapiens
  misc_feature 1..2223: note = B2M sequence
  source 1..2223: mol_type = other DNA
ggcctggaggctatccagcgtgagtctctcctaccctcccgctctggtccttcctctcccgctctgcaccctctgtggccctcgctgtgctctctcgctccgtgacttcccttctccaagttctccttggtggcccgccgtggggctagtccagggctggatctcggggaagcggcggggtggcctgggagtggggaagggggtgcgcacccgggacgcgcgctacttgcccctttcggcggggagcaggggagacctttggcctacggcgacgggagggtcgggacaaagtttagggcgtcgataagcgtcagagcgccgaggttgggggagggtttctcttccgctctttcgcggggcctctggctcccccagcgcagctggagtgggggacgggtaggctcgtcccaaaggcgcggcgctgaggtttgtgaacgcgtggaggggcgcttggggtctgggggaggcgtcgcccgggtaagcctgtctgctgcggctctgcttcccttagactggagagctgtggacttcgtctaggcgcccgctaagttcgcatgtcctagcacctctgggtctatgtggggccacaccgtggggaggaaacagcacgcgacgtttgtagaatgcttggctgtgatacaaagcggtttcgaataattaacttatttgttcccatcacatgtcacttttaaaaaattataagaactacccgttattgacatctttctgtgtgccaaggactttatgtgctttgcgtcatttaattttgaaaacagttatcttccgccatagataactactatggttatcttctgcctctcacagatgaagaaactaaggcaccgagattttaagaaacttaattacacaggggataaatggcagcaatcgagattgaagtcaagcctaaccagggcttttgcgggagcgcatgccttttggctgtaattcgtgcatttttttttaagaaaaacgcctgccttctgcgtgagattctccagagcaaactgggcggcatgggccctgtggtcttttcgtacagagggcttcctctttggctctttgcctggttgtttccaagatgtactgtgcctcttactttcggttttgaaaacatgagggggttgggcgtggtagcttacgcctgtaatcccagcacttagggaggccgaggcgggaggatggcttgaggtccgtagttgagaccagcctggccaacatggtgaagcctggtctctacaaaaaataataacaaaaattagccgggtgtggtggctcgtgcctgtggtcccagctgctccggtggctgaggcgggaggatctcttgagcttaggcttttgagctatcatggcgccagtgcactccagcgtgggcaacagagcgagaccctgtctctcaaaaaagaaaaaaaaaaaaaaagaaagagaaaagaaaagaaagaaagaagtgaaggtttgtcagtcaggggagctgtaaaaccattaataaagataatccaagatggttaccaagactgttgaggacgccagagatcttgagcactttctaagtacctggcaatacactaagcgcgctcaccttttcctctggcaaaacatgatcgaaagcagaatgttttgatcatgagaaaattgcatttaatttgaatacaatttatttacaacataaaggataatgtatatatcaccaccattactggtatttgctggttatgttagatgtcattttaaaaaataacaatctgatatttaaaaaaaaatcttattttgaaaatttccaaagtaatacatgccatgcatagaccatttctggaagataccacaagaaacatgtaatgatgattgcctctgaaggtctattttcctcctctgacctgtgtgtgggttttgtttttgttttactgtgggcataaattaatttttcagttaagttttggaagcttaaataactctccaaaagtcataaagccagtaactggttgagcccaaattcaaacccagcctgtctgatacttgtcctcttcttagaaaagattacagtgatgctctcacaaaatcttgccgccttccctcaaacagagagttccaggcaggatgaatctgtgctctgatccctgaggcatttaatatgttcttattattagaagctcagatgcaaagagctctcttagcttttaatgttatgaaaaaaatcaggtcttcattagattccccaatccacct

SEQ ID NO: 2 - DNA, 20 bp, synthetic construct
  misc_feature 1..20: note = target site sequence
  source 1..20: mol_type = other DNA
gctgccgcccagtgggactt

SEQ ID NO: 3 - DNA, 20 bp, synthetic construct
  misc_feature 1..20: note = target site sequence
  source 1..20: mol_type = other DNA
gatctggtaaagatgattcc

SEQ ID NO: 4 - DNA, 20 bp, synthetic construct
  misc_feature 1..20: note = target site sequence
  source 1..20: mol_type = other DNA
acaatgtgtcaactcttgac

SEQ ID NO: 5 - DNA, 20 bp, synthetic construct
  misc_feature 1..20: note = target site sequence
  source 1..20: mol_type = other DNA
tcactatgctgccgcccagt

SEQ ID NO: 6 - DNA, 20 bp, synthetic construct
  misc_feature 1..20: note = target site sequence
  source 1..20: mol_type = other DNA
ggtgacaagtgtgatcactt

SEQ ID NO: 7 - DNA, 20 bp, synthetic construct
  misc_feature 1..20: note = target site sequence
  source 1..20: mol_type = other DNA
gacaagtgtgatcacttggg

SEQ ID NO: 8 - DNA, 20 bp, synthetic construct
  misc_feature 1..20: note = target site sequence
  source 1..20: mol_type = other DNA
gctgtgtttgcgtctctccc

SEQ ID NO: 9 - DNA, 20 bp, synthetic construct
  misc_feature 1..20: note = target site sequence
  source 1..20: mol_type = other DNA
gatgtctcgctccgtggcct

SEQ ID NO: 10 - DNA, 20 bp, synthetic construct
  misc_feature 1..20: note = target site sequence
  source 1..20: mol_type = other DNA
ctcgcgctactctctctttc

SEQ ID NO: 11 - DNA, 20 bp, synthetic construct
  misc_feature 1..20: note = target site sequence
  source 1..20: mol_type = other DNA
gactcacgctggatagcctc

SEQ ID NO: 12 - DNA, 20 bp, synthetic construct
  misc_feature 1..20: note = target site sequence
  source 1..20: mol_type = other DNA
ccagaaagagagagtagcgc

SEQ ID NO: 13 - DNA, 20 bp, synthetic construct
  misc_feature 1..20: note = target site sequence
  source 1..20: mol_type = other DNA
cacagctaaggccacggagc

SEQ ID NO: 14 - DNA, 20 bp, synthetic construct
  misc_feature 1..20: note = target site sequence
  source 1..20: mol_type = other DNA
ggccgagatgtctcgctccg

SEQ ID NO: 15 - DNA, 20 bp, synthetic construct
  misc_feature 1..20: note = target site sequence
  source 1..20: mol_type = other DNA
ttgcgggagcgcatgccttt

SEQ ID NO: 16 - DNA, 20 bp, synthetic construct
  misc_feature 1..20: note = target site sequence
  source 1..20: mol_type = other DNA
ccacctcttgatggggctag

SEQ ID NO: 17 - DNA, 20 bp, synthetic construct
  misc_feature 1..20: note = target site sequence
  source 1..20: mol_type = other DNA
ataccttgggttgatccact

SEQ ID NO: 18 - DNA, 20 bp, synthetic construct
  misc_feature 1..20: note = target site sequence
  source 1..20: mol_type = other DNA
cgtgagtaaacctgaatctt

SEQ ID NO: 19 - DNA, 20 bp, synthetic construct
  misc_feature 1..20: note = target site sequence
  source 1..20: mol_type = other DNA
agtcaacttcaatgtcggaa

SEQ ID NO: 20 - DNA, 20 bp, synthetic construct
  misc_feature 1..20: note = target site sequence
  source 1..20: mol_type = other DNA
catagatcgagacatgtaag

SEQ ID NO: 21 - DNA, 20 bp, synthetic construct
  misc_feature 1..20: note = target site sequence
  source 1..20: mol_type = other DNA
gctactctctctttctggcc

SEQ ID NO: 22 - DNA, 20 bp, synthetic construct
  misc_feature 1..20: note = target site sequence
  source 1..20: mol_type = other DNA
acccaaaccaagcctttcta

SEQ ID NO: 23 - DNA, 20 bp, synthetic construct
  misc_feature 1..20: note = target site sequence
  source 1..20: mol_type = other DNA
tataagtggaggcgtcgcgc

SEQ ID NO: 24 - DNA, 20 bp, synthetic construct
  misc_feature 1..20: note = PCR primer
  source 1..20: mol_type = other DNA
ctgcaaaaggctgaagagca

SEQ ID NO: 25 - DNA, 25 bp, synthetic construct
  misc_feature 1..25: note = PCR primer
  source 1..25: mol_type = other DNA
ccccaagatgactatctttaatgtc

SEQ ID NO: 26 - DNA, 20 bp, synthetic construct
  misc_feature 1..20: note = PCR primer
  source 1..20: mol_type = other DNA
ctggcttggagacaggtgac

SEQ ID NO: 27 - DNA, 20 bp, synthetic construct
  misc_feature 1..20: note = PCR primer
  source 1..20: mol_type = other DNA
gacgcttatcgacgccctaa

SEQ ID NO: 28 - DNA, 20 bp, synthetic construct
  misc_feature 1..20: note = PCR primer
  source 1..20: mol_type = other DNA
caaaatcttgccgccttccc

SEQ ID NO: 29 - DNA, 23 bp, synthetic construct
  misc_feature 1..23: note = PCR primer
  source 1..23: mol_type = other DNA
actttccaaaatgagaggcatga

SEQ ID NO: 30 - DNA, 23 bp, synthetic construct
  misc_feature 1..23: note = PCR primer
  source 1..23: mol_type = other DNA
ccagagtggaaatggaattggga

SEQ ID NO: 31 - DNA, 25 bp, synthetic construct
  misc_feature 1..25: note = PCR primer
  source 1..25: mol_type = other DNA
actcatacacaactttcagcagctt

SEQ ID NO: 32 - DNA, 20 bp, synthetic construct
  misc_feature 1..20: note = PCR primer
  source 1..20: mol_type = other DNA
tcatgggtaggaacagcagc

SEQ ID NO: 33 - DNA, 20 bp, synthetic construct
  misc_feature 1..20: note = PCR primer
  source 1..20: mol_type = other DNA
tctcctcagcagagatgtcc

SEQ ID NO: 34 - DNA, 23 bp, synthetic construct
  misc_feature 1..23: note = target sequence
  source 1..23: mol_type = other DNA
gctactctctctttctggcctgg

SEQ ID NO: 35 - DNA, 23 bp, synthetic construct
  misc_feature 1..23: note = off-target sequence
  source 1..23: mol_type = other DNA
gctgccgcccagtgggactttgg

SEQ ID NO: 36 - DNA, 23 bp, synthetic construct
  misc_feature 1..23: note = target sequence
  source 1..23: mol_type = other DNA
actgtctccctgtagaaaactgg

SEQ ID NO: 37 - DNA, 23 bp, synthetic construct
  misc_feature 1..23: note = off-target sequence
  source 1..23: mol_type = other DNA
gatctggtaaagatgattcctgg

SEQ ID NO: 38 - DNA, 23 bp, synthetic construct
  misc_feature 1..23: note = target sequence
  source 1..23: mol_type = other DNA
catttagtaaagatgattcctgg

SEQ ID NO: 39 - DNA, 23 bp, synthetic construct
  misc_feature 1..23: note = off-target sequence
  source 1..23: mol_type = other DNA
acaatgtgtcaactcttgacagg

SEQ ID NO: 40 - DNA, 21 bp, synthetic construct
  misc_feature 1..21: note = target sequence
  source 1..21: mol_type = other DNA
gcattttctgttctctgaagt

SEQ ID NO: 41 - DNA, 22 bp, synthetic construct
  misc_feature 1..22: note = off-target sequence
  source 1..22: mol_type = other DNA
tcactatgctgccgcccagtgg

SEQ ID NO: 42 - DNA, 22 bp, synthetic construct
  misc_feature 1..22: note = target sequence
  source 1..22: mol_type = other DNA
tcactaggcatgctgccagagc

SEQ ID NO: 43 - DNA, 23 bp, synthetic construct
  misc_feature 1..23: note = off-target sequence
  source 1..23: mol_type = other DNA
gctgtgtttgcgtctctcccagg

SEQ ID NO: 44 - DNA, 23 bp, synthetic construct
  misc_feature 1..23: note = target sequence
  source 1..23: mol_type = other DNA
gctgtgtttgcttctgtcccagg

SEQ ID NO: 45 - DNA, 23 bp, synthetic construct
  misc_feature 1..23: note = target sequence
  source 1..23: mol_type = other DNA
ccacctcttgatggggctagtag

SEQ ID NO: 46 - DNA, 33 bp, synthetic construct
  misc_feature 1..33: note = target sequence
  source 1..33: mol_type = other DNA
gctactctctctttctcttgatggggctagtag

SEQ ID NO: 47 - DNA, 23 bp, synthetic construct
  misc_feature 1..23: note = target sequence
  source 1..23: mol_type = other DNA
gctgccgcccagtgggactttgg

SEQ ID NO: 48 - DNA, 23 bp, synthetic construct
  misc_feature 1..23: note = target sequence
  source 1..23: mol_type = other DNA
ccaggaatcatctttaccagatc

SEQ ID NO: 49 - DNA, 33 bp, synthetic construct
  misc_feature 1..33: note = target sequence
  source 1..33: mol_type = other DNA
gctgccgcccagtgggatcatctttaccagatc

SEQ ID NO: 50 - DNA, 23 bp, synthetic construct
  misc_feature 1..23: note = target sequence
  source 1..23: mol_type = other DNA
ctccctgggctgcaccatagtga

SEQ ID NO: 51 - DNA, 23 bp, synthetic construct
  misc_feature 1..23: note = target sequence
  source 1..23: mol_type = other DNA
gaccttgtgaagatgattcctgg

SEQ ID NO: 52 - DNA, 23 bp, synthetic construct
  misc_feature 1..23: note = target sequence
  source 1..23: mol_type = other DNA
gatctggggaagaggattccagg

SEQ ID NO: 53 - DNA, 23 bp, synthetic construct
  misc_feature 1..23: note = target sequence
  source 1..23: mol_type = other DNA
agattgtgtatactcttgactag

SEQ ID NO: 54 - DNA, 23 bp, synthetic construct
  misc_feature 1..23: note = target sequence
  source 1..23: mol_type = other DNA
ccaggaatcatctctacgatatc

SEQ ID NO: 55 - DNA, 23 bp, synthetic construct
  misc_feature 1..23: note = target sequence
  source 1..23: mol_type = other DNA
ccaggaatcatctctacgatatc

SEQ ID NO: 56 - DNA, 23 bp, synthetic construct
  misc_feature 1..23: note = target sequence
  source 1..23: mol_type = other DNA
cctggaattctctttactagatc

SEQ ID NO: 57 - DNA, 23 bp, synthetic construct
  misc_feature 1..23: note = target sequence
  source 1..23: mol_type = other DNA
ccggggagaggcgcggacacagc

SEQ ID NO: 58 - DNA, 23 bp, synthetic construct
  misc_feature 1..23: note = target sequence
  source 1..23: mol_type = other DNA
ccagggagagacggaaccaaaac

SEQ ID NO: 59 - DNA, 23 bp, synthetic construct
  misc_feature 1..23: note = target sequence
  source 1..23: mol_type = other DNA
gatctgatacagatgattcatgg

SEQ ID NO: 60 - DNA, 23 bp, synthetic construct
  misc_feature 1..23: note = target sequence
  source 1..23: mol_type = other DNA
ctgggaatcatctttacaagatg

SEQ ID NO: 61 - DNA, 23 bp, synthetic construct
  misc_feature 1..23: note = target sequence
  source 1..23: mol_type = other DNA
tgaatatcctgtcgcccagtcag

SEQ ID NO: 62 - DNA, 23 bp, synthetic construct
  misc_feature 1..23: note = target sequence
  source 1..23: mol_type = other DNA
ccacccaagtgatcactcttcct

SEQ ID NO: 63 - DNA, 23 bp, synthetic construct
  misc_feature 1..23: note = target sequence
  source 1..23: mol_type = other DNA
aggaagagtgatcacttgggtgg

SEQ ID NO: 64 - DNA, 23 bp, synthetic construct
  misc_feature 1..23: note = target sequence
  source 1..23: mol_type = other DNA
tctgtgtttttgtctctccccag

SEQ ID NO: 65 - DNA, 23 bp, synthetic construct
  misc_feature 1..23: note = target sequence
  source 1..23: mol_type = other DNA
tctgtgtttttgtctctccccag

SEQ ID NO: 66 - DNA, 23 bp, synthetic construct
  misc_feature 1..23: note = target sequence
  source 1..23: mol_type = other DNA
aggaagagtgatcacttgggtgg

SEQ ID NO: 67 - DNA, 23 bp, synthetic construct
  misc_feature 1..23: note = target sequence
  source 1..23: mol_type = other DNA
ccacccaagtgatcactcttcct

SEQ ID NO: 68 - DNA, 23 bp, synthetic construct
  misc_feature 1..23: note = target sequence
  source 1..23: mol_type = other DNA
ctaggaatcatcttccccagatg

SEQ ID NO: 69 - DNA, 23 bp, synthetic construct
  misc_feature 1..23: note = target sequence
  source 1..23: mol_type = other DNA
tctgtggaaaagatgattccaag

SEQ ID NO: 70 - DNA, 23 bp, synthetic construct
  misc_feature 1..23: note = target sequence
  source 1..23: mol_type = other DNA
gttcttgttaagatgattcctgg

SEQ ID NO: 71 - DNA, 23 bp, synthetic construct
  misc_feature 1..23: note = target sequence
  source 1..23: mol_type = other DNA
gttcttgttaagatgattcctgg

SEQ ID NO: 72 - DNA, 23 bp, synthetic construct
  misc_feature 1..23: note = target sequence
  source 1..23: mol_type = other DNA
ggcatgtttcatcacttgggggg

SEQ ID NO: 73 - DNA, 23 bp, synthetic construct
  misc_feature 1..23: note = target sequence
  source 1..23: mol_type = other DNA
gggctggtaaagatgtttccagg

SEQ ID NO: 74 - DNA, 23 bp, synthetic construct
  misc_feature 1..23: note = target sequence
  source 1..23: mol_type = other DNA
gacaagtgtgatcacctggttgg

SEQ ID NO: 75 - DNA, 23 bp, synthetic construct
  misc_feature 1..23: note = target sequence
  source 1..23: mol_type = other DNA
gctgtgtttgcttctgtcccagg

SEQ ID NO: 76 - DNA, 23 bp, synthetic construct
  misc_feature 1..23: note = target sequence
  source 1..23: mol_type = other DNA
ccaggaatcatctttactaaatg

SEQ ID NO: 77 - DNA, 23 bp, synthetic construct
  misc_feature 1..23: note = target sequence
  source 1..23: mol_type = other DNA
ccaggaatcatctttactaaatg

SEQ ID NO: 78 - DNA, 23 bp, synthetic construct
  misc_feature 1..23: note = target sequence
  source 1..23: mol_type = other DNA
tcactatgctgccgcccagtggg

SEQ ID NO: 79 - DNA, 23 bp, synthetic construct
  misc_feature 1..23: note = target sequence
  source 1..23: mol_type = other DNA
gctgccgcccagtgggactttgg

SEQ ID NO: 80 - DNA, 23 bp, synthetic construct
  misc_feature 1..23: note = target sequence
  source 1..23: mol_type = other DNA
acaatgtgtcaactcttgacagg

SEQ ID NO: 81 - DNA, 23 bp, synthetic construct
  misc_feature 1..23: note = target sequence
  source 1..23: mol_type = other DNA
gacaagtgtgatcacttgggtgg

SEQ ID NO: 82 - DNA, 23 bp, synthetic construct
  misc_feature 1..23: note = target sequence
  source 1..23: mol_type = other DNA
gctgtgtttgcgtctctcccagg

SEQ ID NO: 83 - DNA, 23 bp, synthetic construct
  misc_feature 1..23: note = target sequence
  source 1..23: mol_type = other DNA
ccaggaatcatctttaccagatc

SEQ ID NO: 84 - DNA, 23 bp, synthetic construct
  misc_feature 1..23: note = target sequence
  source 1..23: mol_type = other DNA
acaaggggtcaactctggacaag

SEQ ID NO: 85 - DNA, 23 bp, synthetic construct
  misc_feature 1..23: note = target sequence
  source 1..23: mol_type = other DNA
acaaggggtcaactctggacaag

SEQ ID NO: 86 - DNA, 23 bp, synthetic construct
  misc_feature 1..23: note = target sequence
  source 1..23: mol_type = other DNA
cccactgggctgcagcatcctgg

SEQ ID NO: 87 - DNA, 23 bp, synthetic construct
  misc_feature 1..23: note = target sequence
  source 1..23: mol_type = other DNA
ccagcgcgtgacgcaaacacagc

SEQ ID NO: 88 - DNA, 23 bp, synthetic construct
  misc_feature 1..23: note = target sequence
  source 1..23: mol_type = other DNA
acaatgtgtcaccttttaactgg

SEQ ID NO: 89 - DNA, 23 bp, synthetic construct
  misc_feature 1..23: note = target sequence
  source 1..23: mol_type = other DNA
acaatatttcaacacttgacaag

SEQ ID NO: 90 - DNA, 23 bp, synthetic construct
  misc_feature 1..23: note = target sequence
  source 1..23: mol_type = other DNA
cttggagtcatctttgccacatc

SEQ ID NO: 91 - DNA, 23 bp, synthetic construct
  misc_feature 1..23: note = target sequence
  source 1..23: mol_type = other DNA
gacaagcgtgatcccatggggag

SEQ ID NO: 92 - DNA, 23 bp, synthetic construct
  misc_feature 1..23: note = target sequence
  source 1..23: mol_type = other DNA
cctcccaagtaatcacccttttc

SEQ ID NO: 93 - DNA, 23 bp, synthetic construct
  misc_feature 1..23: note = target sequence
  source 1..23: mol_type = other DNA
cccaagtcccactggcaggtggc

SEQ ID NO: 94 - DNA, 23 bp, synthetic construct
  misc_feature 1..23: note = target sequence
  source 1..23: mol_type = other DNA
gctatgtgttaactcttgacaag

SEQ ID NO: 95 - DNA, 23 bp, synthetic construct
  misc_feature 1..23: note = target sequence
  source 1..23: mol_type = other DNA
gctatgtgttaactcttgacaag

SEQ ID NO: 96 - DNA, 23 bp, synthetic construct
  misc_feature 1..23: note = target sequence
  source 1..23: mol_type = other DNA
ccactatggtgcctcccagtcag

SEQ ID NO: 97 - DNA, 23 bp, synthetic construct
  misc_feature 1..23: note = target sequence
  source 1..23: mol_type = other DNA
tcactctgctgctgtccagtggg

SEQ ID NO: 98 - DNA, 23 bp, synthetic construct
  misc_feature 1..23: note = target sequence
  source 1..23: mol_type = other DNA
actctgtcctgccgcccagtgag

SEQ ID NO: 99 - DNA, 23 bp, synthetic construct
  misc_feature 1..23: note = target sequence
  source 1..23: mol_type = other DNA
cttggaatcatctctacctgatt

SEQ ID NO: 100 - DNA, 23 bp, synthetic construct
  misc_feature 1..23: note = target sequence
  source 1..23: mol_type = other DNA
cccaagtcccactgggtgacatg

SEQ ID NO: 101 - DNA, 23 bp, synthetic construct
  misc_feature 1..23: note = target sequence
  source 1..23: mol_type = other DNA
ctaaggagagaggcacacacagc

SEQ ID NO: 102 - DNA, 23 bp, synthetic construct
  misc_feature 1..23: note = target sequence
  source 1..23: mol_type = other DNA
ccagggagggacgcaaacccagc

SEQ ID NO: 103 - DNA, 23 bp, synthetic construct
  misc_feature 1..23: note = target sequence
  source 1..23: mol_type = other DNA
ccagggagggacgcaaacccagc

SEQ ID NO: 104 - DNA, 23 bp, synthetic construct
  misc_feature 1..23: note = target sequence
  source 1..23: mol_type = other DNA
cttctcaagtgatcccactggtc

SEQ ID NO: 105 - DNA, 23 bp, synthetic construct
  misc_feature 1..23: note = target sequence
  source 1..23: mol_type = other DNA
cctgagagagaagcaaacacaga

SEQ ID NO: 106 - DNA, 23 bp, synthetic construct
  misc_feature 1..23: note = target sequence
  source 1..23: mol_type = other DNA
cttaggaaagacgcaaacatagc

SEQ ID NO: 107 - DNA, 23 bp, synthetic construct
  misc_feature 1..23: note = target sequence
  source 1..23: mol_type = other DNA
acattgattaaactcttgactag

SEQ ID NO: 108 - DNA, 23 bp, synthetic construct
  misc_feature 1..23: note = target sequence
  source 1..23: mol_type = other DNA
acaaagtttaaactcttgagcag

SEQ ID NO: 109 - DNA, 23 bp, synthetic construct
  misc_feature 1..23: note = target sequence
  source 1..23: mol_type = other DNA
cttcccaagtgattacactttat

SEQ ID NO: 110 - DNA, 23 bp, synthetic construct
  misc_feature 1..23: note = target sequence
  source 1..23: mol_type = other DNA
cccactggggcgcagcctagtga

SEQ ID NO: 111 - DNA, 23 bp, synthetic construct
  misc_feature 1..23: note = target sequence
  source 1..23: mol_type = other DNA
cttgtcaagatttgccacattat

SEQ ID NO: 112 - DNA, 23 bp, synthetic construct
  misc_feature 1..23: note = target sequence
  source 1..23: mol_type = other DNA
cttgtcaagatttgccacattat

SEQ ID NO: 113 - DNA, 23 bp, synthetic construct
  misc_feature 1..23: note = target sequence
  source 1..23: mol_type = other DNA
ccttggtgagaggcaaacacagc

SEQ ID NO: 114 - DNA, 23 bp, synthetic construct
  misc_feature 1..23: note = target sequence
  source 1..23: mol_type = other DNA
cctactgggcgtcagcactgtgt

SEQ ID NO: 115 - DNA, 23 bp, synthetic construct
  misc_feature 1..23: note = target sequence
  source 1..23: mol_type = other DNA
tcactatgcagcaccccagtggg

SEQ ID NO: 116 - DNA, 23 bp, synthetic construct
  misc_feature 1..23: note = target sequence
  source 1..23: mol_type = other DNA
ccaggcatcttctttaccagctc

SEQ ID NO: 117 - DNA, 23 bp, synthetic construct
  misc_feature 1..23: note = target sequence
  source 1..23: mol_type = other DNA
ctcactgggctgcagcattgggg

SEQ ID NO: 118 - DNA, 23 bp, synthetic construct
  misc_feature 1..23: note = target sequence
  source 1..23: mol_type = other DNA
ccagggagagacgcagaaacaac

SEQ ID NO: 119 - DNA, 23 bp, synthetic construct
  misc_feature 1..23: note = target sequence
  source 1..23: mol_type = other DNA
ccagggagagacgcagaaacaac

SEQ ID NO: 120 - DNA, 23 bp, synthetic construct
  misc_feature 1..23: note = target sequence
  source 1..23: mol_type = other DNA
tacatgagtaatcacttggggag

SEQ ID NO: 121 - DNA, 23 bp, synthetic construct
  misc_feature 1..23: note = target sequence
  source 1..23: mol_type = other DNA
ctccccaagtgattactcatgta

SEQ ID NO: 122 - DNA, 23 bp, synthetic construct
  misc_feature 1..23: note = target sequence
  source 1..23: mol_type = other DNA
ctccccaagtgattactcatgta

SEQ ID NO: 123 - DNA, 23 bp, synthetic construct
  misc_feature 1..23: note = target sequence
  source 1..23: mol_type = other DNA
tacatgagtaatcacttggggag

SEQ ID NO: 124 - DNA, 23 bp, synthetic construct
  misc_feature 1..23: note = target sequence
  source 1..23: mol_type = other DNA
ctccccaagtgattactcatgta

SEQ ID NO: 125 - DNA, 23 bp, synthetic construct
  misc_feature 1..23: note = target sequence
  source 1..23: mol_type = other DNA
ctccccaagtgattactcatgta

SEQ ID NO: 126 - DNA, 23 bp, synthetic construct
  misc_feature 1..23: note = target sequence
  source 1..23: mol_type = other DNA
tacatgagtaatcacttggggag

SEQ ID NO: 127 - DNA, 23 bp, synthetic construct
  misc_feature 1..23: note = target sequence
  source 1..23: mol_type = other DNA
ctccccaagtgattactcatgta

SEQ ID NO: 128 - DNA, 23 bp, synthetic construct
  misc_feature 1..23: note = target sequence
  source 1..23: mol_type = other DNA
ctccccaagtgattactcatgta

SEQ ID NO: 129 - DNA, 23 bp, synthetic construct
  misc_feature 1..23: note = target sequence
  source 1..23: mol_type = other DNA
tacatgagtaatcacttggggag

SEQ ID NO: 130 - DNA, 23 bp, synthetic construct
  misc_feature 1..23: note = target sequence
  source 1..23: mol_type = other DNA
ctccccaagtgattactcatgta

SEQ ID NO: 131 - DNA, 23 bp, synthetic construct
  misc_feature 1..23: note = target sequence
  source 1..23: mol_type = other DNA
ctccccaagtgattactcatgta

SEQ ID NO: 132 - DNA, 23 bp, synthetic construct
  misc_feature 1..23: note = target sequence
  source 1..23: mol_type = other DNA
cagaggtgtgatcacttgggcag

SEQ ID NO: 133 - DNA, 23 bp, synthetic construct
  misc_feature 1..23: note = target sequence
  source 1..23: mol_type = other DNA
cagaggtgtgatcacttgggcag

SEQ ID NO: 134 - DNA, 23 bp, synthetic construct
  misc_feature 1..23: note = target sequence
  source 1..23: mol_type = other DNA
cttcccatgtgataacacttgtc

SEQ ID NO: 135 - DNA, 23 bp, synthetic construct
  misc_feature 1..23: note = target sequence
  source 1..23: mol_type = other DNA
cttcccatgtgataacacttgtc

SEQ ID NO: 136 - DNA, 23 bp, synthetic construct
  misc_feature 1..23: note = target sequence
  source 1..23: mol_type = other DNA
cctgagagagaggcaaacacatc

SEQ ID NO: 137 - DNA, 23 bp, synthetic construct
  misc_feature 1..23: note = target sequence
  source 1..23: mol_type = other DNA
ccacgaatcctctttaccaaatc

SEQ ID NO: 138 - DNA, 23 bp, synthetic construct
  misc_feature 1..23: note = target sequence
  source 1..23: mol_type = other DNA
ctccccaagtgattactcatgta

SEQ ID NO: 139 - DNA, 23 bp, synthetic construct
  misc_feature 1..23: note = target sequence
  source 1..23: mol_type = other DNA
tacatgagtaatcacttggggag

SEQ ID NO: 140 - DNA, 23 bp, synthetic construct
  misc_feature 1..23: note = target sequence
  source 1..23: mol_type = other DNA
ctccccaagtgattactcatgta

SEQ ID NO: 141 - DNA, 23 bp, synthetic construct
  misc_feature 1..23: note = target sequence
  source 1..23: mol_type = other DNA
cctgagggtgcgtctctcccggg

SEQ ID NO: 142 - DNA, 23 bp, synthetic construct
  misc_feature 1..23: note = target sequence
  source 1..23: mol_type = other DNA
gctgtgtgctcgtctctccctgg

SEQ ID NO: 143 - DNA, 23 bp, synthetic construct
  misc_feature 1..23: note = target sequence
  source 1..23: mol_type = other DNA
gctgtgtgctcgtctctccctgg

SEQ ID NO: 144 - DNA, 23 bp, synthetic construct
  misc_feature 1..23: note = target sequence
  source 1..23: mol_type = other DNA
gctgcggcccagcgggacctggg

SEQ ID NO: 145 - DNA, 23 bp, synthetic construct
  misc_feature 1..23: note = target sequence
  source 1..23: mol_type = other DNA
gctgtacttgggtctctccccag

SEQ ID NO: 146 - DNA, 23 bp, synthetic construct
  misc_feature 1..23: note = target sequence
  source 1..23: mol_type = other DNA
gccgtgttttcctctctcccaag

SEQ ID NO: 147 - DNA, 23 bp, synthetic construct
  misc_feature 1..23: note = target sequence
  source 1..23: mol_type = other DNA
gccgtgttttcctctctcccaag

SEQ ID NO: 148 - DNA, 23 bp, synthetic construct
  misc_feature 1..23: note = target sequence
  source 1..23: mol_type = other DNA
cccactgggctgcagaatacaga

SEQ ID NO: 149 - DNA, 23 bp, synthetic construct
  misc_feature 1..23: note = target sequence
  source 1..23: mol_type = other DNA
ccccccaggagatcacatttgtc

SEQ ID NO: 150 - DNA, 23 bp, synthetic construct
  misc_feature 1..23: note = target sequence
  source 1..23: mol_type = other DNA
gctgccggacagtgggacctggg

SEQ ID NO: 151 - DNA, 23 bp, synthetic construct
  misc_feature 1..23: note = target sequence
  source 1..23: mol_type = other DNA
ctgactggacggcaccttagtga

SEQ ID NO: 152 - DNA, 23 bp, synthetic construct
  misc_feature 1..23: note = target sequence
  source 1..23: mol_type = other DNA
gctgtcttttcctctctccctgg

SEQ ID NO: 153 - DNA, 23 bp, synthetic construct
  misc_feature 1..23: note = target sequence
  source 1..23: mol_type = other DNA
ccagaaataatctttaccagctc

SEQ ID NO: 154 - DNA, 23 bp, synthetic construct
  misc_feature 1..23: note = target sequence
  source 1..23: mol_type = other DNA
gctgtgtttgtgcctcccccagg

SEQ ID NO: 155 - DNA, 23 bp, synthetic construct
  misc_feature 1..23: note = target sequence
  source 1..23: mol_type = other DNA
acaatgtgttggctcttgactag

SEQ ID NO: 156 - DNA, 23 bp, synthetic construct
  misc_feature 1..23: note = target sequence
  source 1..23: mol_type = other DNA
acaatgtgttggctcttgactag

SEQ ID NO: 157 - DNA, 23 bp, synthetic construct
  misc_feature 1..23: note = target sequence
  source 1..23: mol_type = other DNA
gacaagtctgatcattttggggg

SEQ ID NO: 158 - DNA, 23 bp, synthetic construct
  misc_feature 1..23: note = target sequence
  source 1..23: mol_type = other DNA
ccacggagaaacacaaacacagc

SEQ ID NO: 159 - DNA, 23 bp, synthetic construct
  misc_feature 1..23: note = target sequence
  source 1..23: mol_type = other DNA
aaaatgtgtcaactcttgattag

SEQ ID NO: 160 - DNA, 23 bp, synthetic construct
  misc_feature 1..23: note = target sequence
  source 1..23: mol_type = other DNA
aaaatgtgtcaactcttgattag

SEQ ID NO: 161 - DNA, 23 bp, synthetic construct
  misc_feature 1..23: note = target sequence
  source 1..23: mol_type = other DNA
tctgtgtttgcctctctctcagg

SEQ ID NO: 162 - DNA, 23 bp, synthetic construct
  misc_feature 1..23: note = target sequence
  source 1..23: mol_type = other DNA
acaatgtgccagctctggactag

SEQ ID NO: 163 - DNA, 23 bp, synthetic construct
  misc_feature 1..23: note = target sequence
  source 1..23: mol_type = other DNA
gacaagtatgagcacttggtaag

SEQ ID NO: 164 - DNA, 23 bp, synthetic construct
  misc_feature 1..23: note = target sequence
  source 1..23: mol_type = other DNA
gactagtgtgttctcttgggaag

SEQ ID NO: 165 - DNA, 23 bp, synthetic construct
  misc_feature 1..23: note = target sequence
  source 1..23: mol_type = other DNA
gacatgtgtaaacacttgggaag

SEQ ID NO: 166 - DNA, 23 bp, synthetic construct
  misc_feature 1..23: note = target sequence
  source 1..23: mol_type = other DNA
gacatgtgtaaacacttgggaag

SEQ ID NO: 167 - DNA, 23 bp, synthetic construct
  misc_feature 1..23: note = target sequence
  source 1..23: mol_type = other DNA
ccaaagtcccactgggtgacatc

SEQ ID NO: 168 - DNA, 23 bp, synthetic construct
  misc_feature 1..23: note = target sequence
  source 1..23: mol_type = other DNA
ccaaagtcccactgggtgacatc

SEQ ID NO: 169 - DNA, 23 bp, synthetic construct
  misc_feature 1..23: note = target sequence
  source 1..23: mol_type = other DNA
cctgtgagaggctcaaacacagc

SEQ ID NO: 170 - DNA, 23 bp, synthetic construct
  misc_feature 1..23: note = target sequence
  source 1..23: mol_type = other DNA
ccgcagtcccactgtgcggcacc

SEQ ID NO: 171 - DNA, 23 bp, synthetic construct
  misc_feature 1..23: note = target sequence
  source 1..23: mol_type = other DNA
ccgcagtcccactgtgcggcacc

SEQ ID NO: 172 - DNA, 23 bp, synthetic construct
  misc_feature 1..23: note = target sequence
  source 1..23: mol_type = other DNA
gacaagtgtgttcacttctgcag

SEQ ID NO: 173 - DNA, 23 bp, synthetic construct
  misc_feature 1..23: note = target sequence
  source 1..23: mol_type = other DNA
gatttgggaaagatcattccagg

SEQ ID NO: 174 - DNA, 23 bp, synthetic construct
  misc_feature 1..23: note = target sequence
  source 1..23: mol_type = other DNA
gctttggtaaagttgattcctag

SEQ ID NO: 175 - DNA, 23 bp, synthetic construct
  misc_feature 1..23: note = target sequence
  source 1..23: mol_type = other DNA
aaactgtgataactcttgactgg

SEQ ID NO: 176 - DNA, 23 bp, synthetic construct
  misc_feature 1..23: note = target sequence
  source 1..23: mol_type = other DNA
cctaagtcccactggccgaaagt

SEQ ID NO: 177 - DNA, 23 bp, synthetic construct
  misc_feature 1..23: note = target sequence
  source 1..23: mol_type = other DNA
gttctggtcaagatgactcctgg

SEQ ID NO: 178 - DNA, 23 bp, synthetic construct
  misc_feature 1..23: note = target sequence
  source 1..23: mol_type = other DNA
cccaggacccactgggcagcagc

SEQ ID NO: 179 - DNA, 23 bp, synthetic construct
  misc_feature 1..23: note = target sequence
  source 1..23: mol_type = other DNA
aaaatctgtcaactcttgaatag

SEQ ID NO: 180 - DNA, 23 bp, synthetic construct
  misc_feature 1..23: note = target sequence
  source 1..23: mol_type = other DNA
aaaatctgtcaactcttgaatag

SEQ ID NO: 181 - DNA, 23 bp, synthetic construct
  misc_feature 1..23: note = target sequence
  source 1..23: mol_type = other DNA
ctcatcaggagtggacacattgt

SEQ ID NO: 182 - DNA, 23 bp, synthetic construct
  misc_feature 1..23: note = target sequence
  source 1..23: mol_type = other DNA
ccagggggacacgcaaacactgc

SEQ ID NO: 183 - DNA, 23 bp, synthetic construct
  misc_feature 1..23: note = target sequence
  source 1..23: mol_type = other DNA
tcactttgctgccagccagttgg

SEQ ID NO: 184 - DNA, 23 bp, synthetic construct
  misc_feature 1..23: note = target sequence
  source 1..23: mol_type = other DNA
ctgaagtcccactgggtgggtgt

SEQ ID NO: 185 - DNA, 23 bp, synthetic construct
  misc_feature 1..23: note = target sequence
  source 1..23: mol_type = other DNA
gcaccagcccagtgggacttcag

SEQ ID NO: 186 - DNA, 23 bp, synthetic construct
  misc_feature 1..23: note = target sequence
  source 1..23: mol_type = other DNA
gcaccagcccagtgggacttcag

SEQ ID NO: 187 - DNA, 23 bp, synthetic construct
  misc_feature 1..23: note = target sequence
  source 1..23: mol_type = other DNA
gcaccagcccagtgggacttcag

SEQ ID NO: 188 - DNA, 23 bp, synthetic construct
  misc_feature 1..23: note = target sequence
  source 1..23: mol_type = other DNA
gcaccagcccagtgggacttcag

SEQ ID NO: 189 - DNA, 23 bp, synthetic construct
  misc_feature 1..23: note = target sequence
  source 1..23: mol_type = other DNA
ccagggaaagaggcaagcacagc

SEQ ID NO: 190 - DNA, 23 bp, synthetic construct
  misc_feature 1..23: note = target sequence
  source 1..23: mol_type = other DNA
ccactatacacccgcccagtcag

SEQ ID NO: 191 - DNA, 23 bp, synthetic construct
  misc_feature 1..23: note = target sequence
  source 1..23: mol_type = other DNA
ccattgtgctgccgcccagccag

SEQ ID NO: 192 - DNA, 23 bp, synthetic construct
  misc_feature 1..23: note = target sequence
  source 1..23: mol_type = other DNA
gatctggaagagatgattccaag

SEQ ID NO: 193 - DNA, 23 bp, synthetic construct
  misc_feature 1..23: note = target sequence
  source 1..23: mol_type = other DNA
cccgggagggaggcaaaaacagc

SEQ ID NO: 194 - DNA, 23 bp, synthetic construct
  misc_feature 1..23: note = target sequence
  source 1..23: mol_type = other DNA
gctgagtctgggtctctccccag

SEQ ID NO: 195 - DNA, 23 bp, synthetic construct
  misc_feature 1..23: note = target sequence
  source 1..23: mol_type = other DNA
gctgagtctgggtctctccccag

SEQ ID NO: 196 - DNA, 23 bp, synthetic construct
  misc_feature 1..23: note = target sequence
  source 1..23: mol_type = other DNA
cctggaatgttctttcccagatc

SEQ ID NO: 197 - DNA, 23 bp, synthetic construct
  misc_feature 1..23: note = target sequence
  source 1..23: mol_type = other DNA
cctggaatgttctttcccagatc

SEQ ID NO: 198 - DNA, 23 bp, synthetic construct
  misc_feature 1..23: note = target sequence
  source 1..23: mol_type = other DNA
gacaggtgtgagcactttgggag

SEQ ID NO: 199 - DNA, 23 bp, synthetic construct
  misc_feature 1..23: note = target sequence
  source 1..23: mol_type = other DNA
gacacttgtgatgacttgggtag

SEQ ID NO: 200 - DNA, 23 bp, synthetic construct
  misc_feature 1..23: note = target sequence
  source 1..23: mol_type = other DNA
ctttggagagacgcagacactgc

SEQ ID NO: 201 - DNA, 23 bp, synthetic construct
  misc_feature 1..23: note = target sequence
  source 1..23: mol_type = other DNA
ctttggagagacgcagacactgc

SEQ ID NO: 202 - DNA, 23 bp, synthetic construct
  misc_feature 1..23: note = target sequence
  source 1..23: mol_type = other DNA
cctggaatgttctttcccagatc

SEQ ID NO: 203 - DNA, 23 bp, synthetic construct
  misc_feature 1..23: note = target sequence
  source 1..23: mol_type = other DNA
cctggaatgttctttcccagatc

SEQ ID NO: 204 - DNA, 23 bp, synthetic construct
  misc_feature 1..23: note = target sequence
  source 1..23: mol_type = other DNA
ctacccaagtgttcatatttgtc

SEQ ID NO: 205 - DNA, 23 bp, synthetic construct
  misc_feature 1..23: note = target sequence
  source 1..23: mol_type = other DNA
ccagaaatcatgtttaccagctc

SEQ ID NO: 206 - DNA, 23 bp, synthetic construct
  misc_feature 1..23: note = target sequence
  source 1..23: mol_type = other DNA
ctggagtcccactgcgcggcagc

SEQ ID NO: 207 - DNA, 23 bp, synthetic construct
  misc_feature 1..23: note = target sequence
  source 1..23: mol_type = other DNA
cctgggaaaggcgcaaacacagc

SEQ ID NO: 208 - DNA, 23 bp, synthetic construct
  misc_feature 1..23: note = target sequence
  source 1..23: mol_type = other DNA
gatctgataaaggtgagtccagg

SEQ ID NO: 209 - DNA, 23 bp, synthetic construct
  misc_feature 1..23: note = target sequence
  source 1..23: mol_type = other DNA
gcaagttgctgccgcccagtggg

SEQ ID NO: 210 - DNA, 23 bp, synthetic construct
  misc_feature 1..23: note = target sequence
  source 1..23: mol_type = other DNA
tacatgagtaatcacttggggag

SEQ ID NO: 211 - DNA, 23 bp, synthetic construct
  misc_feature 1..23: note = target sequence
  source 1..23: mol_type = other DNA
ctccccaagtgattactcatgta

SEQ ID NO: 212 - DNA, 23 bp, synthetic construct
  misc_feature 1..23: note = target sequence
  source 1..23: mol_type = other DNA
ctccccaagtgattactcatgta

SEQ ID NO: 213 - DNA, 23 bp, synthetic construct
  misc_feature 1..23: note = target sequence
  source 1..23: mol_type = other DNA
gcagtgtgtgggtctctcccagg

SEQ ID NO: 214 - DNA, 23 bp, synthetic construct
  misc_feature 1..23: note = target sequence
  source 1..23: mol_type = other DNA
gcagtgtgtgggtctctcccagg

SEQ ID NO: 215 - DNA, 23 bp, synthetic construct
  misc_feature 1..23: note = target sequence
  source 1..23: mol_type = other DNA
tacatgagtaatcacttggggag

SEQ ID NO: 216 - DNA, 23 bp, synthetic construct
  misc_feature 1..23: note = target sequence
  source 1..23: mol_type = other DNA
ctccccaagtgattactcatgta

SEQ ID NO: 217 - DNA, 23 bp, synthetic construct
  misc_feature 1..23: note = target sequence
  source 1..23: mol_type = other DNA
ctccccaagtgattactcatgta

SEQ ID NO: 218 - DNA, 23 bp, synthetic construct
  misc_feature 1..23: note = target sequence
  source 1..23: mol_type = other DNA
ccaaagtcgcactggcctgcagc

SEQ ID NO: 219 - DNA, 23 bp, synthetic construct
  misc_feature 1..23: note = target sequence
  source 1..23: mol_type = other DNA
gatctgggagagaagattccagg

SEQ ID NO: 220 - DNA, 23 bp, synthetic construct
  misc_feature 1..23: note = target sequence
  source 1..23: mol_type = other DNA
ccagaaaagagttgacacatagt

SEQ ID NO: 221 - DNA, 23 bp, synthetic construct
  misc_feature 1..23: note = target sequence
  source 1..23: mol_type = other DNA
cctgccaagggttgacacatggt

SEQ ID NO: 222 - DNA, 23 bp, synthetic construct
  misc_feature 1..23: note = target sequence
  source 1..23: mol_type = other DNA
gacaagtgtcataactttggaag

SEQ ID NO: 223 - DNA, 23 bp, synthetic construct
  misc_feature 1..23: note = target sequence
  source 1..23: mol_type = other DNA
ataatgtgtcaaccctggaccag

SEQ ID NO: 224 - DNA, 23 bp, synthetic construct
  misc_feature 1..23: note = target sequence
  source 1..23: mol_type = other DNA
ccaaagacccactggacggcagc

SEQ ID NO: 225 - DNA, 23 bp, synthetic construct
  misc_feature 1..23: note = target sequence
  source 1..23: mol_type = other DNA
ccaaagacccactggacggcagc

SEQ ID NO: 226 - DNA, 23 bp, synthetic construct
  misc_feature 1..23: note = target sequence
  source 1..23: mol_type = other DNA
ccaactggccggcagcctggtga

SEQ ID NO: 227 - DNA, 23 bp, synthetic construct
  misc_feature 1..23: note = target sequence
  source 1..23: mol_type = other DNA
ccaactggccggcagcctggtga

SEQ ID NO: 228 - DNA, 45 bp, synthetic construct
  misc_feature 1..45: note = target sequence
  source 1..45: mol_type = other DNA
tatgctgccgcccagtgggactttggaaatacaatgtgtcaactc

SEQ ID NO: 229 - DNA, 45 bp, synthetic construct
  misc_feature 1..45: note = target sequence
  source 1..45: mol_type = other DNA
ggctgtgtttgcgtctctcccaggaatcatctttaccagatctca

SEQ ID NO: 230 - DNA, 20 bp, synthetic construct
  misc_feature 1..20: note = target sequence
  source 1..20: mol_type = other DNA
tatgctgccgcccagtggga

SEQ ID NO: 231 - DNA, 25 bp, synthetic construct
  misc_feature 1..25: note = target sequence
  source 1..25: mol_type = other DNA
atcatctttaccagatctcaaaaag

SEQ ID NO: 232 - DNA, 25 bp, synthetic construct
  misc_feature 1..25: note = target sequence
  source 1..25: mol_type = other DNA
gagttgacacattgtatttccaaag

SEQ ID NO: 233 - DNA, 20 bp, synthetic construct
  misc_feature 1..20: note = target sequence
  source 1..20: mol_type = other DNA
atcatctttaccagatctca

SEQ ID NO: 234 - DNA, 20 bp, synthetic construct
  misc_feature 1..20: note = target sequence
  source 1..20: mol_type = other DNA
tatgctgccgcccagtggga

SEQ ID NO: 235 - DNA, 25 bp, synthetic construct
  misc_feature 1..25: note = target sequence
  source 1..25: mol_type = other DNA
tcctgggagagacgcaaacacagcc

SEQ ID NO: 236 - DNA, 25 bp, synthetic construct
  misc_feature 1..25: note = target sequence
  source 1..25: mol_type = other DNA
tggctgtgtttgcgtctctcccagg

SEQ ID NO: 237 - DNA, 20 bp, synthetic construct
  misc_feature 1..20: note = target sequence
  source 1..20: mol_type = other DNA
atcatctttaccagatctca

SEQ ID NO: 238 - DNA, 20 bp, synthetic construct
  misc_feature 1..20: note = target sequence
  source 1..20: mol_type = other DNA
tatgctgccgcccagtggga

SEQ ID NO: 239 - DNA, 25 bp, synthetic construct
  misc_feature 1..25: note = target sequence
  source 1..25: mol_type = other DNA
catcatctttaccagatctcaaaaa

SEQ ID NO: 240 - DNA, 20 bp, synthetic construct
  misc_feature 1..20: note = target sequence
  source 1..20: mol_type = other DNA
tatgctgccgcccagtggga

SEQ ID NO: 241 - DNA, 25 bp, synthetic construct
  misc_feature 1..25: note = target sequence
  source 1..25: mol_type = other DNA
tttggaaatacaatgtgtcaactct

SEQ ID NO: 242 - DNA, 20 bp, synthetic construct
  misc_feature 1..20: note = target sequence
  source 1..20: mol_type = other DNA
tatgctgccgcccagtggga

SEQ ID NO: 243 - DNA, 25 bp, synthetic construct
  misc_feature 1..25: note = target sequence
  source 1..25: mol_type = other DNA
tcatctttaccagatctcaaaaaga

SEQ ID NO: 244 - DNA, 25 bp, synthetic construct
  misc_feature 1..25: note = target sequence
  source 1..25: mol_type = other DNA
gctgtgtttgcgtctctcccaggaa

SEQ ID NO: 245 - DNA, 20 bp, synthetic construct
  misc_feature 1..20: note = target sequence
  source 1..20: mol_type = other DNA
atcatctttaccagatctca

SEQ ID NO: 246 - DNA, 20 bp, synthetic construct
  misc_feature 1..20: note = target sequence
  source 1..20: mol_type = other DNA
tatgctgccgcccagtggga

SEQ ID NO: 247 - DNA, 25 bp, synthetic construct
  misc_feature 1..25: note = target sequence
  source 1..25: mol_type = other DNA
actttggaaatacaatgtgtcaact

SEQ ID NO: 248 - DNA, 20 bp, synthetic construct
  misc_feature 1..20: note = target sequence
  source 1..20: mol_type = other DNA
tatgctgccgcccagtggga

SEQ ID NO: 249 - DNA, 25 bp, synthetic construct
  misc_feature 1..25: note = target sequence
  source 1..25: mol_type = other DNA
tggaaatacaatgtgtcaactcttg

SEQ ID NO: 250 - DNA, 25 bp, synthetic construct
  misc_feature 1..25: note = target sequence
  source 1..25: mol_type = other DNA
gtggctgtgtttgcgtctctcccag

SEQ ID NO: 251 - DNA, 20 bp, synthetic construct
  misc_feature 1..20: note = target sequence
  source 1..20: mol_type = other DNA
atcatctttaccagatctca

SEQ ID NO: 252 - DNA, 20 bp, synthetic construct
  misc_feature 1..20: note = target sequence
  source 1..20: mol_type = other DNA
tatgctgccgcccagtggga

SEQ ID NO: 253 - DNA, 25 bp, synthetic construct
  misc_feature 1..25: note = target sequence
  source 1..25: mol_type = other DNA
tcctttggaaatacaatgtgtcaac

SEQ ID NO: 254 - DNA, 20 bp, synthetic construct
  misc_feature 1..20: note = target sequence
  source 1..20: mol_type = other DNA
tatgctgccgcccagtggga

SEQ ID NO: 255 - DNA, 25 bp, synthetic construct
  misc_feature 1..25: note = target sequence
  source 1..25: mol_type = other DNA
atctttaccagatctcaaaaagaag

SEQ ID NO: 256 - DNA, 25 bp, synthetic construct
  misc_feature 1..25: note = target sequence
  source 1..25: mol_type = other DNA
tggtggctgtgtttgcgtctctccc

SEQ ID NO: 257 - DNA, 20 bp, synthetic construct
  misc_feature 1..20: note = target sequence
  source 1..20: mol_type = other DNA
atcatctttaccagatctca

SEQ ID NO: 258 - DNA, 20 bp, synthetic construct
  misc_feature 1..20: note = target sequence
  source 1..20: mol_type = other DNA
tatgctgccgcccagtggga

SEQ ID NO: 259 - DNA, 25 bp, synthetic construct
  misc_feature 1..25: note = target sequence
  source 1..25: mol_type = other DNA
aatcatctttaccagatctcaaaaa

SEQ ID NO: 260 - DNA, 25 bp, synthetic construct
  misc_feature 1..25: note = target sequence
  source 1..25: mol_type = other DNA
tcactatgctgccgcccagtgggaa

SEQ ID NO: 261 - DNA, 20 bp, synthetic construct
  misc_feature 1..20: note = target sequence
  source 1..20: mol_type = other DNA
atcatctttaccagatctca

SEQ ID NO: 262 - DNA, 20 bp, synthetic construct
  misc_feature 1..20: note = target sequence
  source 1..20: mol_type = other DNA
tatgctgccgcccagtggga

SEQ ID NO: 263 - DNA, 25 bp, synthetic construct
  misc_feature 1..25: note = target sequence
  source 1..25: mol_type = other DNA
aatgtgtcaactcttgacagggctc

SEQ ID NO: 264 - DNA, 20 bp, synthetic construct
  misc_feature 1..20: note = target sequence
  source 1..20: mol_type = other DNA
tatgctgccgcccagtggga

SEQ ID NO: 265 - DNA, 25 bp, synthetic construct
  misc_feature 1..25: note = target sequence
  source 1..25: mol_type = other DNA
ttggaaatacaatgtgtcaactctt

SEQ ID NO: 266 - DNA, 25 bp, synthetic construct
  misc_feature 1..25: note = target sequence
  source 1..25: mol_type = other DNA
gagttacatgatcccccatgttgtg

SEQ ID NO: 267 - DNA, 20 bp, synthetic construct
  misc_feature 1..20: note = target sequence
  source 1..20: mol_type = other DNA
atcatctttaccagatctca

SEQ ID NO: 268 - DNA, 25 bp, synthetic construct
  misc_feature 1..25: note = target sequence
  source 1..25: mol_type = other DNA
gtggtggctgtgtttgcgtctcccc

SEQ ID NO: 269 - DNA, 20 bp, synthetic construct
  misc_feature 1..20: note = target sequence
  source 1..20: mol_type = other DNA
atcatctttaccagatctca

SEQ ID NO: 270 - DNA, 45 bp, synthetic construct
  misc_feature 1..45: note = target sequence
  source 1..45: mol_type = other DNA
ggctgtgtttgcgtctctcccaggtatcatctttaccagatctca

SEQ ID NO: 271 - DNA, 20 bp, synthetic construct
  misc_feature 1..20: note = target sequence
  source 1..20: mol_type = other DNA
tatgctgccgcccagtggga

SEQ ID NO: 272 - DNA, 25 bp, synthetic construct
  misc_feature 1..25: note = target sequence
  source 1..25: mol_type = other DNA
catctttaccagatctcaaaaagaa

SEQ ID NO: 273 - DNA, 20 bp, synthetic construct
  misc_feature 1..20: note = target sequence
  source 1..20: mol_type = other DNA
tatgctgccgcccagtggga

SEQ ID NO: 274 - DNA, 25 bp, synthetic construct
  misc_feature 1..25: note = target sequence
  source 1..25: mol_type = other DNA
aatacaatgtgtcaactcttgacag

SEQ ID NO: 275 - DNA, 20 bp, synthetic construct
  misc_feature 1..20: note = target sequence
  source 1..20: mol_type = other DNA
tatgctgccgcccagtggga

SEQ ID NO: 276 - DNA, 25 bp, synthetic construct
  misc_feature 1..25: note = target sequence
  source 1..25: mol_type = other DNA
atacaatgtgtcaactcttgacagg

SEQ ID NO: 277 - DNA, 45 bp, synthetic construct
  misc_feature 1..45: note = target sequence
  source 1..45: mol_type = other DNA
tatgctgccgcccagtgggattttggaaatacaatgtttcaactc

SEQ ID NO: 278 - DNA, 45 bp, synthetic construct
  misc_feature 1..45: note = target sequence
  source 1..45: mol_type = other DNA
atacaatgtgtcaactcttgacagggctctattttataggcttct

SEQ ID NO: 279 - DNA, 45 bp, synthetic construct
  misc_feature 1..45: note = target sequence
  source 1..45: mol_type = other DNA
ggctcactatgctgccgcccagtgggactttggaaatacaatgtg

SEQ ID NO: 280 - DNA, 20 bp, synthetic construct
  misc_feature 1..20: note = target sequence
  source 1..20: mol_type = other DNA
ggctcactatgctgccgccc

SEQ ID NO: 281 - DNA, 25 bp, synthetic construct
  misc_feature 1..25: note = target sequence
  source 1..25: mol_type = other DNA
gacagggctctattttataggcttc

SEQ ID NO: 282 - DNA, 20 bp, synthetic construct
  misc_feature 1..20: note = target sequence
  source 1..20: mol_type = other DNA
ggctcactatgctgccgccc

SEQ ID NO: 283 - DNA, 25 bp, synthetic construct
  misc_feature 1..25: note = target sequence
  source 1..25: mol_type = other DNA
tgacagggctctattttataggctt

SEQ ID NO: 284 - DNA, 20 bp, synthetic construct
  misc_feature 1..20: note = target sequence
  source 1..20: mol_type = other DNA
ggctcactatgctgccgccc

SEQ ID NO: 285 - DNA, 25 bp, synthetic construct
  misc_feature 1..25: note = target sequence
  source 1..25: mol_type = other DNA
ttgacagggctctattttataggct

SEQ ID NO: 286 - DNA, 19 bp, synthetic construct
  misc_feature 1..19: note = target sequence
  source 1..19: mol_type = other DNA
aatacaatgtgtcaactct

SEQ ID NO: 287 - DNA, 26 bp, synthetic construct
  misc_feature 1..26: note = target sequence
  source 1..26: mol_type = other DNA
gacagggctctattttataggcttct

SEQ ID NO: 288 - DNA, 45 bp, synthetic construct
  misc_feature 1..45: note = target sequence
  source 1..45: mol_type = other DNA
ggctcactatgctgccgcccagggggactttggaaatacaatgtg

SEQ ID NO: 289 - DNA, 20 bp, synthetic construct
  misc_feature 1..20: note = target sequence
  source 1..20: mol_type = other DNA
ggctcactatgctgccgccc

SEQ ID NO: 290 - DNA, 25 bp, synthetic construct
  misc_feature 1..25: note = target sequence
  source 1..25: mol_type = other DNA
gggactttggaaatacaatgtgtca

SEQ ID NO: 291 - DNA, 19 bp, synthetic construct
  misc_feature 1..19: note = target sequence
  source 1..19: mol_type = other DNA
ccggcaaacaaaccaccgc

SEQ ID NO: 292 - DNA, 26 bp, synthetic construct
  misc_feature 1..26: note = target sequence
  source 1..26: mol_type = other DNA
gacagggctctattttataggcttct

SEQ ID NO: 293 - DNA, 19 bp, synthetic construct
  misc_feature 1..19: note = target sequence
  source 1..19: mol_type = other DNA
gaaatacaatgtgtcaact

SEQ ID NO: 294 - DNA, 26 bp, synthetic construct
  misc_feature 1..26: note = target sequence
  source 1..26: mol_type = other DNA
gacagggctctattttataggcttct

SEQ ID NO: 295 - DNA, 22 bp, synthetic construct
  misc_feature 1..22: note = target sequence
  source 1..22: mol_type = other DNA
tcactatacaatgtgtcaagac

SEQ ID NO: 296 - DNA, 23 bp, synthetic construct
  misc_feature 1..23: note = target sequence
  source 1..23: mol_type = other DNA
agggctctattttataggcttct

SEQ ID NO: 297 - DNA, 19 bp, synthetic construct
  misc_feature 1..19: note = target sequence
  source 1..19: mol_type = other DNA
aaatacaatgtgtcaactc

SEQ ID NO: 298 - protein, 1368 aa, unidentified [sequence omitted]

SEQ ID NO: 299 - DNA, 26 bp, synthetic construct
  misc_feature 1..26: note = target sequence
  source 1..26: mol_type = other DNA
gacagggctctattttataggcttct

SEQ ID NO: 300 - DNA, 20 bp, synthetic construct
  misc_feature 1..20: note = target sequence
  source 1..20: mol_type = other DNA
ggctcactatgctgccgccc

SEQ ID NO: 301 - DNA, 25 bp, synthetic construct
  misc_feature 1..25: note = target sequence
  source 1..25: mol_type = other DNA
aacagggctctattttataggcttc

SEQ ID NO: 302 - DNA, 45 bp, synthetic construct
  misc_feature 1..45: note = target sequence
  source 1..45: mol_type = other DNA
atacaatgtgtcaactcttgacaaggctctattttataggcttct

SEQ ID NO: 303 - DNA, 20 bp, synthetic construct
  misc_feature 1..20: note = target sequence
  source 1..20: mol_type = other DNA
cccagtgggactttggaaaa

SEQ ID NO: 304 - DNA, 25 bp, synthetic construct
  misc_feature 1..25: note = target sequence
  source 1..25: mol_type = other DNA
acagggctctattttataggcttct

SEQ ID NO: 305 - DNA, 19 bp, synthetic construct
  misc_feature 1..19: note = target sequence
  source 1..19: mol_type = other DNA
atacaatgtgtcaactcct

SEQ ID NO: 306 - DNA, 26 bp, synthetic construct
  misc_feature 1..26: note = target sequence
  source 1..26: mol_type = other DNA
gacagggctctattttataggcttct

SEQ ID NO: 307 - DNA, 19 bp, synthetic construct
  misc_feature 1..19: note = target sequence
  source 1..19: mol_type = other DNA
atacaatgtgtcaactctc

SEQ ID NO: 308 - DNA, 26 bp, synthetic construct
  misc_feature 1..26: note = target sequence
  source 1..26: mol_type = other DNA
gacagggctctattttataggcttct

SEQ ID NO: 309 - DNA, 45 bp, synthetic construct; identical to SEQ ID NO: 279
  misc_feature 1..45: note = target sequence
  source 1..45: mol_type = other DNA

SEQ ID NO: 310 - DNA, 45 bp, synthetic construct
  misc_feature 1..45: note = target sequence
  source 1..45: mol_type = other DNA
gggtggtggctgtgtttgcgtctctcccaggaatcatctttacca

SEQ ID NO: 311 - DNA, 25 bp, synthetic construct
  misc_feature 1..25: note = target sequence
  source 1..25: mol_type = other DNA
ttctgggctcactatgctgccgccc

SEQ ID NO: 312 - DNA, 20 bp, synthetic construct
  misc_feature 1..20: note = target sequence
  source 1..20: mol_type = other DNA
cccaggaatcatctttacca

SEQ ID NO: 313 - DNA, 20 bp, synthetic construct
  misc_feature 1..20: note = target sequence
  source 1..20: mol_type = other DNA
ggctcactatgctgccgccc

SEQ ID NO: 314 - DNA, 25 bp, synthetic construct
  misc_feature 1..25: note = target sequence
  source 1..25: mol_type = other DNA
cccaggaatcatctttaccagatct

SEQ ID NO: 315 - DNA, 20 bp, synthetic construct
  misc_feature 1..20: note = target sequence
  source 1..20: mol_type = other DNA
ggctcactatgctgccgccc

SEQ ID NO: 316 - DNA, 25 bp, synthetic construct
  misc_feature 1..25: note = target sequence
  source 1..25: mol_type = other DNA
tcccaggaatcatctttaccagatc

SEQ ID NO: 317 - DNA, 25 bp, synthetic construct
  misc_feature 1..25: note = target sequence
  source 1..25: mol_type = other DNA
tctgggctcactatgctgccgccct

SEQ ID NO: 318 - DNA, 20 bp, synthetic construct
  misc_feature 1..20: note = target sequence
  source 1..20: mol_type = other DNA
cccaggaatcatctttacca

SEQ ID NO: 319 - DNA, 20 bp, synthetic construct
  misc_feature 1..20: note = target sequence
  source 1..20: mol_type = other DNA
ggctcactatgctgccgccc

SEQ ID NO: 320 - DNA, 25 bp, synthetic construct
  misc_feature 1..25: note = target sequence
  source 1..25: mol_type = other DNA
agagacgcaaacacagccaccaccc

SEQ ID NO: 321 - DNA, 25 bp, synthetic construct
  misc_feature 1..25: note = target sequence
  source 1..25: mol_type = other DNA
cacattgtatttccaaagtcccact

SEQ ID NO: 322 - DNA, 20 bp, synthetic construct
  misc_feature 1..20: note = target sequence
  source 1..20: mol_type = other DNA
cccaggaatcatctttacca

SEQ ID NO: 323 - DNA, 20 bp, synthetic construct
  misc_feature 1..20: note = target sequence
  source 1..20: mol_type = other DNA
ggctcactatgctgccgccc

SEQ ID NO: 324 - DNA, 25 bp, synthetic construct
  misc_feature 1..25: note = target sequence
  source 1..25: mol_type = other DNA
aatgtgtcaactcttgacagggctc

SEQ ID NO: 325 - DNA, 20 bp, synthetic construct
  misc_feature 1..20: note = target sequence
  source 1..20: mol_type = other DNA
ggctcactatgctgccgccc

SEQ ID NO: 326 - DNA, 25 bp, synthetic construct
  misc_feature 1..25: note = target sequence
  source 1..25: mol_type = other DNA
agagacgcaaacacagccaccaccc

SEQ ID NO: 327 - DNA, 25 bp, synthetic construct
  misc_feature 1..25: note = target sequence
  source 1..25: mol_type = other DNA
acattgtatttccaaagtcccactt

SEQ ID NO: 328 - DNA, 20 bp, synthetic construct
  misc_feature 1..20: note = target sequence
  source 1..20: mol_type = other DNA
cccaggaatcatctttacca

SEQ ID NO: 329 - DNA, 20 bp, synthetic construct
  misc_feature 1..20: note = target sequence
  source 1..20: mol_type = other DNA
ggctcactatgctgccgccc

SEQ ID NO: 330 - DNA, 25 bp, synthetic construct
  misc_feature 1..25: note = target sequence
  source 1..25: mol_type = other DNA
tagtgggactttggaaatacaatgt

SEQ ID NO: 331 - DNA, 25 bp, synthetic construct
  misc_feature 1..25: note = target sequence
  source 1..25: mol_type = other DNA
ggtggtggctgtgtttgcgtctctt

SEQ ID NO: 332 - DNA, 20 bp, synthetic construct
  misc_feature 1..20: note = target sequence
  source 1..20: mol_type = other DNA
cccaggaatcatctttacca

SEQ ID NO: 333 - DNA, 25 bp, synthetic construct
  misc_feature 1..25: note = target sequence
  source 1..25: mol_type = other DNA
cttctgggctcactatgctgccgcc

SEQ ID NO: 334 - DNA, 20 bp, synthetic construct
  misc_feature 1..20: note = target sequence
  source 1..20: mol_type = other DNA
cccaggaatcatctttacca

SEQ ID NO: 335 - DNA, 25 bp, synthetic construct
  misc_feature 1..25: note = target sequence
  source 1..25: mol_type = other DNA
gctgtttcctgtgtgaaattgttat

SEQ ID NO: 336 - DNA, 20 bp, synthetic construct
  misc_feature 1..20: note = target sequence
  source 1..20: mol_type = other DNA
cccaggaatcatctttacca

SEQ ID NO: 337 - DNA, 25 bp, synthetic construct
  misc_feature 1..25: note = target sequence
  source 1..25: mol_type = other DNA
cccttctgggctcactatgctgccg

SEQ ID NO: 338 - DNA, 20 bp, synthetic construct
  misc_feature 1..20: note = target sequence
  source 1..20: mol_type = other DNA
cccaggaatcatctttacca

SEQ ID NO: 339 - DNA, 20 bp, synthetic construct
  misc_feature 1..20: note = target sequence
  source 1..20: mol_type = other DNA
ggctcactatgctgccgccc

SEQ ID NO: 340 - DNA, 25 bp, synthetic construct
  misc_feature 1..25: note = target sequence
  source 1..25: mol_type = other DNA
aggaatcatctttaccagatctcaa

SEQ ID NO: 341 - DNA, 20 bp, synthetic construct
  misc_feature 1..20: note = target sequence
  source 1..20: mol_type = other DNA
ggctcactatgctgccgccc

SEQ ID NO: 342 - DNA, 25 bp, synthetic construct
  misc_feature 1..25: note = target sequence
  source 1..25: mol_type = other DNA
ccaggaatcatctttaccagatctc

SEQ ID NO: 343 - DNA, 20 bp, synthetic construct
  misc_feature 1..20: note = target sequence
  source 1..20: mol_type = other DNA
ggctcactatgctgccgccc

SEQ ID NO: 344 - DNA, 25 bp, synthetic construct
  misc_feature 1..25: note = target sequence
  source 1..25: mol_type = other DNA
ttactgtcgtccatgctgtgtttgc

SEQ ID NO: 345 - DNA, 24 bp, synthetic construct
  misc_feature 1..24: note = target sequence
  source 1..24: mol_type = other DNA
ttctgggctcactatgctgccgcc

SEQ ID NO: 346 - DNA, 21 bp, synthetic construct
  misc_feature 1..21: note = target sequence
  source 1..21: mol_type = other DNA
tcccaggaatcatctttacca

SEQ ID NO: 347 - DNA, 20 bp, synthetic construct
  misc_feature 1..20: note = target sequence
  source 1..20: mol_type = other DNA
ggctcactatgctgccgccc

SEQ ID NO: 348 - DNA, 25 bp, synthetic construct
  misc_feature 1..25: note = target sequence
  source 1..25: mol_type = other DNA
ttaccagatctcaaaaagaaggtct

SEQ ID NO: 349 - DNA, 20 bp, synthetic construct
  misc_feature 1..20: note = B2M gRNA target site sequence
  source 1..20: mol_type = other DNA
ggctcactatgctgccgccc

SEQ ID NO: 350 - DNA, 25 bp, synthetic construct
  misc_feature 1..25: note = target sequence
  source 1..25: mol_type = other DNA
tgtataccgtcgacctctagctaga

SEQ ID NO: 351 - DNA, 20 bp, synthetic construct
  misc_feature 1..20: note = target sequence
  source 1..20: mol_type = other DNA
ggctcactatgctgccgccc

SEQ ID NO: 352 - DNA, 25 bp, synthetic construct
  misc_feature 1..25: note = target sequence
  source 1..25: mol_type = other DNA
cagtgggactttggaaatacaatgt

SEQ ID NO: 353 - DNA, 20 bp, synthetic construct
  misc_feature 1..20: note = target sequence
  source 1..20: mol_type = other DNA
ggctcactatgctgccgccc

SEQ ID NO: 354 - DNA, 25 bp, synthetic construct
  misc_feature 1..25: note = target sequence
  source 1..25: mol_type = other DNA
tgggactttggaaatacaatgtgtc

SEQ ID NO: 355 - DNA, 20 bp, synthetic construct
  misc_feature 1..20: note = target sequence
  source 1..20: mol_type = other DNA
ggctcactatgctgccgccc

SEQ ID NO: 356 - DNA, 25 bp, synthetic construct
  misc_feature 1..25: note = target sequence
  source 1..25: mol_type = other DNA
aatacaatgtgtcaactcttgacag

SEQ ID NO: 357 - DNA, 20 bp, synthetic construct
  misc_feature 1..20: note = target sequence
  source 1..20: mol_type = other DNA
ggctcactatgctgccgccc

SEQ ID NO: 358 - DNA, 25 bp, synthetic construct
  misc_feature 1..25: note = target sequence
  source 1..25: mol_type = other DNA
tctcccaggaatcatctttaccaga

SEQ ID NO: 359 - DNA, 25 bp, synthetic construct
  misc_feature 1..25: note = target sequence
  source 1..25: mol_type = other DNA
tgggctcactatgctgccgccctct

SEQ ID NO: 360 - DNA, 20 bp, synthetic construct
  misc_feature 1..20: note = target sequence
  source 1..20: mol_type = other DNA
cccaggaatcatctttacca

SEQ ID NO: 361 - DNA, 25 bp, synthetic construct
  misc_feature 1..25: note = target sequence
  source 1..25: mol_type = other DNA
tactgtccccttctgggctcactat

SEQ ID NO: 362 - DNA, 20 bp, synthetic construct
  misc_feature 1..20: note = target sequence
  source 1..20: mol_type = other DNA
cccaggaatcatctttacca

SEQ ID NO: 363 - DNA, 25 bp, synthetic construct
  misc_feature 1..25: note = target sequence
  source 1..25: mol_type = other DNA
tgggtggtggctgtgtttgcgtctt

SEQ ID NO: 364 - DNA, 20 bp, synthetic construct
  misc_feature 1..20: note = target sequence
  source 1..20: mol_type = other DNA
cccaggaatcatctttacca

SEQ ID NO: 365 - DNA, 25 bp, synthetic construct
  misc_feature 1..25: note = target sequence
  source 1..25: mol_type = other DNA
acttgggtggtggctgtgtttgcgt

SEQ ID NO: 366 - DNA, 20 bp, synthetic construct
  misc_feature 1..20: note = target sequence
  source 1..20: mol_type = other DNA
cccaggaatcatctttacca

SEQ ID NO: 367 - DNA, 20 bp, synthetic construct
  misc_feature 1..20: note = target sequence
  source 1..20: mol_type = other DNA
ggctcactatgctgccgccc

SEQ ID NO: 368 - DNA, 25 bp, synthetic construct
  misc_feature 1..25: note = target sequence
  source 1..25: mol_type = other DNA
aagtgggactttggaaatacaatgt

SEQ ID NO: 369 - DNA, 20 bp, synthetic construct
  misc_feature 1..20: note = target sequence
  source 1..20: mol_type = other DNA
ggctcactatgctgccgccc

SEQ ID NO: 370 - DNA, 25 bp, synthetic construct
  misc_feature 1..25: note = target sequence
  source 1..25: mol_type = other DNA
gtgggactttggaaatacaatgtgt

SEQ ID NO: 371 - DNA, 20 bp, synthetic construct
  misc_feature 1..20: note = target sequence
  source 1..20: mol_type = other DNA
ggctcactatgctgccgccc

SEQ ID NO: 372 - DNA, 25 bp, synthetic construct
  misc_feature 1..25: note = target sequence
  source 1..25: mol_type = other DNA
tcttcatcatcctcctgacaatcga

SEQ ID NO: 373 - DNA, 20 bp, synthetic construct
  misc_feature 1..20: note = target sequence
  source 1..20: mol_type = other DNA
ggctcactatgctgccgccc

SEQ ID NO: 374 - DNA, 25 bp, synthetic construct
  misc_feature 1..25: note = target sequence
  source 1..25: mol_type = other DNA
ttataggcttcttctctggaatctt

SEQ ID NO: 375 - DNA, 25 bp, synthetic construct
  misc_feature 1..25: note = target sequence
  source 1..25: mol_type = other DNA
ttcttcgatcagtctaaaaatggct

SEQ ID NO: 376 - DNA, 20 bp, synthetic construct
  misc_feature 1..20: note = target sequence
  source 1..20: mol_type = other DNA
cccaggaatcatctttacca

SEQ ID NO: 377 - DNA, 20 bp, synthetic construct
  misc_feature 1..20: note = target sequence
  source 1..20: mol_type = other DNA
ggctcactatgctgccgccc

SEQ ID NO: 378 - DNA, 25 bp, synthetic construct
  misc_feature 1..25: note = target sequence
  source 1..25: mol_type = other DNA
catctttaccagatctcaaaaagaa

SEQ ID NO: 379 - DNA, 20 bp, synthetic construct
  misc_feature 1..20: note = target sequence
  source 1..20: mol_type = other DNA
ggctcactatgctgccgccc

SEQ ID NO: 380 - DNA, 25 bp, synthetic construct
  misc_feature 1..25: note = target sequence
  source 1..25: mol_type = other DNA
aataggcttcttctctggaatcttc

SEQ ID NO: 381 - DNA, 20 bp, synthetic construct
  misc_feature 1..20: note = target sequence
  source 1..20: mol_type = other DNA
ggctcactatgctgccgccc

SEQ ID NO: 382 - DNA, 25 bp, synthetic construct
  misc_feature 1..25: note = target sequence
  source 1..25: mol_type = other DNA
tttggggtggtgacaagtgtgatca

SEQ ID NO: 383 - DNA, 20 bp, synthetic construct
  misc_feature 1..20: note = target sequence
  source 1..20: mol_type = other DNA
ggctcactatgctgccgccc

SEQ ID NO: 384 - DNA, 25 bp, synthetic construct
  misc_feature 1..25: note = target sequence
  source 1..25: mol_type = other DNA
ttaaaagccaggacggtcacctttg

SEQ ID NO: 385 - DNA, 20 bp, synthetic construct
  misc_feature 1..20: note = target sequence
  source 1..20: mol_type = other DNA
ggctcactatgctgccgccc

SEQ ID NO: 386 - DNA, 25 bp, synthetic construct
  misc_feature 1..25: note = target sequence
  source 1..25: mol_type = other DNA
tgtttgcgtctctcccaggaatcat

SEQ ID NO: 387 - DNA, 25 bp, synthetic construct
  misc_feature 1..25: note = target sequence
  source 1..25: mol_type = other DNA
agtgtgatcacttgggtggtggctg

SEQ ID NO: 388 - DNA, 20 bp, synthetic construct
  misc_feature 1..20: note = target sequence
  source 1..20: mol_type = other DNA
cccaggaatcatctttacca

SEQ ID NO: 389 - DNA, 20 bp, synthetic construct
  misc_feature 1..20: note = target sequence
  source 1..20: mol_type = other DNA
ggctcactatgctgccgccc

SEQ ID NO: 390 - DNA, 25 bp, synthetic construct
  misc_feature 1..25: note = target sequence
  source 1..25: mol_type = other DNA
tctggaatcttcttcatcatcctcc

SEQ ID NO: 391 - DNA, 45 bp, synthetic construct
  misc_feature 1..45: note = target sequence
  source 1..45: mol_type = other DNA
ggctcactatgctgccgccctgtgggactttggaaatacaatgtg

SEQ ID NO: 392 - DNA, 20 bp, synthetic construct
  misc_feature 1..20: note = target sequence
  source 1..20: mol_type = other DNA
ggctcactatgctgccgccc

SEQ ID NO: 393 - DNA, 25 bp, synthetic construct
  misc_feature 1..25: note = target sequence
  source 1..25: mol_type = other DNA
tttggaaatacaatgtgtcaactct

SEQ ID NO: 394 - DNA, 20 bp, synthetic construct
  misc_feature 1..20: note = target sequence
  source 1..20: mol_type = other DNA
ggctcactatgctgccgccc

SEQ ID NO: 395 - DNA, 25 bp, synthetic construct
  misc_feature 1..25: note = target sequence
  source 1..25: mol_type = other DNA
cccaagaatcatctttaccagatct

SEQ ID NO: 396 - DNA, 25 bp, synthetic construct
  misc_feature 1..25: note = target sequence
  source 1..25: mol_type = other DNA
ccttctgggctcactatgctgccgc

SEQ ID NO: 397 - DNA, 20 bp, synthetic construct
  misc_feature 1..20: note = target sequence
  source 1..20: mol_type = other DNA
cccaggaatcatctttacca

SEQ ID NO: 398 - DNA, 25 bp, synthetic construct
  misc_feature 1..25: note = target sequence
  source 1..25: mol_type = other DNA
tgggtggtggctgtgtttgcgtctc

SEQ ID NO: 399 - DNA, 20 bp, synthetic construct
  misc_feature 1..20: note = target sequence
  source 1..20: mol_type = other DNA
cccaggaatcatctttacca

SEQ ID NO: 400 - DNA, 20 bp, synthetic construct
  misc_feature 1..20: note = target sequence
  source 1..20: mol_type = other DNA
ggctcactatgctgccgccc

SEQ ID NO: 401 - DNA, 25 bp, synthetic construct
  misc_feature 1..25: note = target sequence
  source 1..25: mol_type = other DNA
acaatgtgtcaactcttgacagggc

SEQ ID NO: 402 - DNA, 20 bp, synthetic construct
  misc_feature 1..20: note = target sequence
  source 1..20: mol_type = other DNA
ggctcactatgctgccgccc

SEQ ID NO: 403 - DNA, 25 bp, synthetic construct
  misc_feature 1..25: note = target sequence
  source 1..25: mol_type = other DNA
gtgggactttggaaattcaatgtgt

SEQ ID NO: 404 - DNA, 20 bp, synthetic construct
  misc_feature 1..20: note = target sequence
  source 1..20: mol_type = other DNA
ggctcactatgctgccgccc

SEQ ID NO: 405 - DNA, 25 bp, synthetic construct
  misc_feature 1..25: note = target sequence
  source 1..25: mol_type = other DNA
gcccaggaatcatctttaccagatc

SEQ ID NO: 406 - DNA, 20 bp, synthetic construct
  misc_feature 1..20: note = target sequence
  source 1..20: mol_type = other DNA
ggctcactatgctgccgccc

SEQ ID NO: 407 - DNA, 25 bp, synthetic construct
  misc_feature 1..25: note = target sequence
  source 1..25: mol_type = other DNA
ggctgtgtttgcgtctctccaggaa

SEQ ID NO: 408 - DNA, 25 bp, synthetic construct
  misc_feature 1..25: note = target sequence
  source 1..25: mol_type = other DNA
tcttactgtccccttctgcgtctct

SEQ ID NO: 409 - DNA, 20 bp, synthetic construct
  misc_feature 1..20: note = target sequence
  source 1..20: mol_type = other DNA
cccaggaatcatctttacca

SEQ ID NO: 410 - DNA, 25 bp, synthetic construct
  misc_feature 1..25: note = target sequence
  source 1..25: mol_type = other DNA
ggtggtggctgtgtttgcgtctctc

SEQ ID NO: 411 - DNA, 20 bp, synthetic construct
  misc_feature 1..20: note = target sequence
  source 1..20: mol_type = other DNA
cccaggaatcatctttacca

SEQ ID NO: 412 - DNA, 23 bp, synthetic construct
  misc_feature 1..23: note = target sequence
  source 1..23: mol_type = other DNA
ccaggaatcatctttactaaatg

SEQ ID NO: 413 - DNA, 23 bp, synthetic construct
  misc_feature 1..23: note = target sequence
  source 1..23: mol_type = other DNA
ccaggcatcttctttaccagctc

SEQ ID NO: 414 - DNA, 23 bp, synthetic construct
  misc_feature 1..23: note = target sequence
  source 1..23: mol_type = other DNA
aaaatgtgtcaactcttgattag

SEQ ID NO: 415 - DNA, 23 bp, synthetic construct
  misc_feature 1..23: note = target sequence
  source 1..23: mol_type = other DNA
aaaatgtgtcaactcttgattag

SEQ ID NO: 416 - DNA, 23 bp, synthetic construct
  misc_feature 1..23: note = target sequence
  source 1..23: mol_type = other DNA
cccactgggctgcagaatacaga

SEQ ID NO: 417 - DNA, 23 bp, synthetic construct
  misc_feature 1..23: note = target sequence
  source 1..23: mol_type = other DNA
tctgtgtttgcctctctctcagg

SEQ ID NO: 418 - DNA, 23 bp, synthetic construct
  misc_feature 1..23: note = target sequence
  source 1..23: mol_type = other DNA
cccgggagggaggcaaaaacagc

SEQ ID NO: 419 - DNA, 27 bp, synthetic construct
  misc_feature 1..27: note = B2M gRNA target site sequence
  source 1..27: mol_type = other DNA
tttaatataagtggaggcgtcgcgctg

SEQ ID NO: 420 - DNA, 27 bp, synthetic construct
  misc_feature 1..27: note = B2M gRNA target site sequence
  source 1..27: mol_type = other DNA
tttctggcctggaggctatccagcgtg

SEQ ID NO: 421 - DNA, 27 bp, synthetic construct
  misc_feature 1..27: note = B2M gRNA target site sequence
  source 1..27: mol_type = other DNA
tttcggcggggagcaggggagaccttt

SEQ ID NO: 422 - DNA, 27 bp, synthetic construct
  misc_feature 1..27: note = B2M gRNA target site sequence
  source 1..27: mol_type = other DNA
tttggcctacggcgacgggagggtcgg

SEQ ID NO: 423 - DNA, 27 bp, synthetic construct
  misc_feature 1..27: note = B2M gRNA target site sequence
  source 1..27: mol_type = other DNA
tttgtcccgaccctcccgtcgccgtag

SEQ ID NO: 424 - DNA, 27 bp, synthetic construct
  misc_feature 1..27: note = B2M gRNA target site sequence
  source 1..27: mol_type = other DNA
tttagggcgtcgataagcgtcagagcg

SEQ ID NO: 425 - DNA, 27 bp, synthetic construct
  misc_feature 1..27: note = B2M gRNA target site sequence
  source 1..27: mol_type = other DNA
tttctcttccgctctttcgcggggcct

SEQ ID NO: 426 - DNA, 27 bp, synthetic construct
  misc_feature 1..27: note = B2M gRNA target site sequence
  source 1..27: mol_type = other DNA
tttcgcggggcctctggctcccccagc

SEQ ID NO: 427 - DNA, 27 bp, synthetic construct
  misc_feature 1..27: note = B2M gRNA target site sequence
  source 1..27: mol_type = other DNA
tttgggacgagcctacccgtcccccac

SEQ ID NO: 428 - DNA, 27 bp, synthetic construct
  misc_feature 1..27: note = B2M gRNA target site sequence
  source 1..27: mol_type = other DNA
tttgtgaacgcgtggaggggcgcttgg

SEQ ID NO: 429 - DNA, 27 bp, synthetic construct
  misc_feature 1..27: note = B2M gRNA target site sequence
  source 1..27: mol_type = other DNA
tttcctccccacggtgtggccccacat

SEQ ID NO: 430 - DNA, 27 bp, synthetic construct
  misc_feature 1..27: note = B2M gRNA target site sequence
  source 1..27: mol_type = other DNA
tttgtagaatgcttggctgtgatacaa

SEQ ID NO: 431 - DNA, 27 bp, synthetic construct
  misc_feature 1..27: note = B2M gRNA target site sequence
  source 1..27: mol_type = other DNA
tttgtatcacagccaagcattctacaa

SEQ ID NO: 432 - DNA, 27 bp, synthetic construct
  misc_feature 1..27: note = B2M gRNA target site sequence
  source 1..27: mol_type = other DNA
tttcgaataattaacttatttgttccc

SEQ ID NO: 433 - DNA, 27 bp, synthetic construct
  misc_feature 1..27: note = B2M gRNA target site sequence
  source 1..27: mol_type = other DNA
tttgttcccatcacatgtcacttttaa

SEQ ID NO: 434 - DNA, 27 bp, synthetic construct
  misc_feature 1..27: note = B2M gRNA target site sequence
  source 1..27: mol_type = other DNA
tttaaaagtgacatgtgatgggaacaa

SEQ ID NO: 435 - DNA, 27 bp, synthetic construct
  misc_feature 1..27: note = B2M gRNA target site sequence
  source 1..27: mol_type = other DNA
ttttaaaagtgacatgtgatgggaaca

SEQ ID NO: 436 - DNA, 27 bp, synthetic construct
  misc_feature 1..27: note = B2M gRNA target site sequence
  source 1..27: mol_type = other DNA
tttttaaaagtgacatgtgatgggaac

SEQ ID NO: 437 - DNA, 27 bp, synthetic construct
  misc_feature 1..27: note = B2M gRNA target site sequence
  source 1..27: mol_type = other DNA
ttttttaaaagtgacatgtgatgggaa

SEQ ID NO: 438 - DNA, 27 bp, synthetic construct
  misc_feature 1..27: note = B2M gRNA target site sequence
  source 1..27: mol_type = other DNA
ttttaaaaaattataagaactacccgt

SEQ ID NO: 439 - DNA, 27 bp, synthetic construct
  misc_feature 1..27: note = B2M gRNA target site sequence
  source 1..27: mol_type = other DNA
tttaaaaaattataagaactacccgtt

SEQ ID NO: 440 - DNA, 27 bp, synthetic construct
  misc_feature 1..27: note = B2M gRNA target site sequence
  source 1..27: mol_type = other DNA
tttctgtgtgccaaggactttatgtgc

SEQ ID NO: 441 - DNA, 27 bp, synthetic construct
  misc_feature 1..27: note = B2M gRNA target site sequence
  source 1..27: mol_type = other DNA
tttatgtgctttgcgtcatttaatttt

SEQ ID NO: 442 - DNA, 27 bp, synthetic construct
  misc_feature 1..27: note = B2M gRNA target site sequence
  source 1..27: mol_type = other DNA
tttcaaaattaaatgacgcaaagcaca

SEQ ID NO: 443 - DNA, 27 bp, synthetic construct
  misc_feature 1..27: note = B2M gRNA target site sequence
  source 1..27: mol_type = other DNA
ttttcaaaattaaatgacgcaaagcac

SEQ ID NO: 444 - DNA, 27 bp, synthetic construct
  misc_feature 1..27: note = B2M gRNA target site sequence
  source 1..27: mol_type = other DNA
tttgcgtcatttaattttgaaaacagt

SEQ ID NO: 445 - DNA, 27 bp, synthetic construct
  misc_feature 1..27: note = B2M gRNA target site sequence
  source 1..27: mol_type = other DNA
tttaattttgaaaacagttatcttccg

SEQ ID NO: 446 - DNA, 27 bp, synthetic construct
  misc_feature 1..27: note = B2M gRNA target site sequence
  source 1..27: mol_type = other DNA
ttttgaaaacagttatcttccgccata

SEQ ID NO: 447 - DNA, 27 bp, synthetic construct
  misc_feature 1..27: note = B2M gRNA target site sequence
  source 1..27: mol_type = other DNA
tttgaaaacagttatcttccgccatag

SEQ ID NO: 448 - DNA, 27 bp, synthetic construct
  misc_feature 1..27: note = B2M gRNA target site sequence
  source 1..27: mol_type = other DNA
tttcttcatctgtgagaggcagaagat

SEQ ID NO: 449 - DNA, 27 bp, synthetic construct
  misc_feature 1..27: note = B2M gRNA target site sequence
  source 1..27: mol_type = other DNA
tttcttaaaatctcggtgccttagttt

SEQ ID NO: 450 - DNA, 27 bp, synthetic construct
  misc_feature 1..27: note = B2M gRNA target site sequence
  source 1..27: mol_type = other DNA
ttttaagaaacttaattacacagggga

SEQ ID NO: 451 - DNA, 27 bp, synthetic construct
  misc_feature 1..27: note = B2M gRNA target site sequence
  source 1..27: mol_type = other DNA
tttaagaaacttaattacacaggggat

SEQ ID NO: 452 - DNA, 27 bp, synthetic construct
  misc_feature 1..27: note = B2M gRNA target site sequence
  source 1..27: mol_type = other DNA
tttatcccctgtgtaattaagtttctt

SEQ ID NO: 453 - DNA, 27 bp, synthetic construct
  misc_feature 1..27: note = B2M gRNA target site sequence
  source 1..27: mol_type = other DNA
ttttgcgggagcgcatgccttttggct

SEQ ID NO: 454 - DNA, 27 bp, synthetic construct
  misc_feature 1..27: note = B2M gRNA target site sequence
  source 1..27: mol_type = other DNA
tttgcgggagcgcatgccttttggctg

SEQ ID NO: 455 - DNA, 27 bp, synthetic construct
  misc_feature 1..27: note = B2M gRNA target site sequence
  source 1..27: mol_type = other DNA
ttttggctgtaattcgtgcattttttt

SEQ ID NO: 456 - DNA, 27 bp, synthetic construct
  misc_feature 1..27: note = B2M gRNA target site sequence
  source 1..27: mol_type = other DNA
tttggctgtaattcgtgcatttttttt

SEQ ID NO: 457 - DNA, 27 bp, synthetic construct
  misc_feature 1..27: note = B2M gRNA target site sequence
  source 1..27: mol_type = other DNA
tttcttaaaaaaaaatgcacgaattac

SEQ ID NO: 458 - DNA, 27 bp, synthetic construct
  misc_feature 1..27: note = B2M gRNA target site sequence
  source 1..27: mol_type = other DNA
ttttcttaaaaaaaaatgcacgaatta

SEQ ID NO: 459 - DNA, 27 bp, synthetic construct
  misc_feature 1..27: note = B2M gRNA target site sequence
  source 1..27: mol_type = other DNA
tttttcttaaaaaaaaatgcacgaatt

SEQ ID NO: 460 - DNA, 27 bp, synthetic construct
  misc_feature 1..27: note = B2M gRNA target site sequence
  source 1..27: mol_type = other DNA
tttttttttaagaaaaacgcctgcctt

SEQ ID NO: 461 - DNA, 27 bp, synthetic construct
  misc_feature 1..27: note = B2M gRNA target site sequence
  source 1..27: mol_type = other DNA
ttttttttaagaaaaacgcctgccttc

SEQ ID NO: 462 - DNA, 27 bp, synthetic construct
  misc_feature 1..27: note = B2M gRNA target site sequence
  source 1..27: mol_type = other DNA
tttttttaagaaaaacgcctgccttct

SEQ ID NO: 463 - DNA, 27 bp, synthetic construct
  misc_feature 1..27: note = B2M gRNA target site sequence
  source 1..27: mol_type = other DNA
ttttttaagaaaaacgcctgccttctg

SEQ ID NO: 464 - DNA, 27 bp, synthetic construct
  misc_feature 1..27: note = B2M gRNA target site sequence
  source 1..27: mol_type = other DNA
tttttaagaaaaacgcctgccttctgc

SEQ ID NO: 465 - DNA, 27 bp, synthetic construct
  misc_feature 1..27: note = B2M gRNA target site sequence
  source 1..27: mol_type = other DNA
ttttaagaaaaacgcctgccttctgcg

SEQ ID NO: 466 - DNA, 27 bp, synthetic construct
  misc_feature 1..27: note = B2M gRNA target site sequence
  source 1..27: mol_type = other DNA
tttaagaaaaacgcctgccttctgcgt

SEQ ID NO: 467 - DNA, 27 bp, synthetic construct
  misc_feature 1..27: note = B2M gRNA target site sequence
  source 1..27: mol_type = other DNA
tttgctctggagaatctcacgcagaag

SEQ ID NO: 468 - DNA, 27 bp, synthetic construct
  misc_feature 1..27: note = B2M gRNA target site sequence
  source 1..27: mol_type = other DNA
ttttcgtacagagggcttcctctttgg

SEQ ID NO: 469 - DNA, 27 bp, synthetic construct
  misc_feature 1..27: note = B2M gRNA target site sequence
  source 1..27: mol_type = other DNA
tttcgtacagagggcttcctctttggc

SEQ ID NO: 470 - DNA, 27 bp, synthetic construct
  misc_feature 1..27: note = B2M gRNA target site sequence
  source 1..27: mol_type = other DNA
tttggctctttgcctggttgtttccaa

SEQ ID NO: 471 - DNA, 27 bp, synthetic construct
  misc_feature 1..27: note = B2M gRNA target site sequence
  source 1..27: mol_type = other DNA
tttgcctggttgtttccaagatgtact

SEQ ID NO: 472 - DNA, 27 bp, synthetic construct
  misc_feature 1..27: note = B2M gRNA target site sequence
  source 1..27: mol_type = other DNA
tttccaagatgtactgtgcctcttact

SEQ ID NO: 473 - DNA, 27 bp, synthetic construct
  misc_feature 1..27: note = B2M gRNA target site sequence
  source 1..27: mol_type = other DNA
tttcaaaaccgaaagtaagaggcacag

SEQ ID NO: 474 - DNA, 27 bp, synthetic construct
  misc_feature 1..27: note = B2M gRNA target site sequence
  source 1..27: mol_type = other DNA
ttttcaaaaccgaaagtaagaggcaca

SEQ ID NO: 475 - DNA, 27 bp, synthetic construct
  misc_feature 1..27: note = B2M gRNA target site sequence
  source 1..27: mol_type = other DNA
tttcggttttgaaaacatgagggggtt

SEQ ID NO: 476 - DNA, 27 bp, synthetic construct
  misc_feature 1..27: note = B2M gRNA target site sequence
  source 1..27: mol_type = other DNA
ttttgaaaacatgagggggttgggcgt

SEQ ID NO: 477 - DNA, 27 bp, synthetic construct
  misc_feature 1..27: note = B2M gRNA target site sequence
  source 1..27: mol_type = other DNA
tttgaaaacatgagggggttgggcgtg

SEQ ID NO: 478 - DNA, 27 bp, synthetic construct
  misc_feature 1..27: note = B2M gRNA target site sequence
  source 1..27: mol_type = other DNA
tttgtagagaccaggcttcaccatgtt

SEQ ID NO: 479 - DNA, 27 bp, synthetic construct
  misc_feature 1..27: note = B2M gRNA target site sequence
  source 1..27: mol_type = other DNA
ttttgtagagaccaggcttcaccatgt

SEQ ID NO: 480 - DNA, 27 bp, synthetic construct
  misc_feature 1..27: note = B2M gRNA target site sequence
  source 1..27: mol_type = other DNA
tttttgtagagaccaggcttcaccatg

SEQ ID NO: 481 - DNA, 27 bp, synthetic construct
  misc_feature 1..27: note = B2M gRNA target site sequence
  source 1..27: mol_type = other DNA
ttttttgtagagaccaggcttcaccat

SEQ ID NO: 482 - DNA, 27 bp, synthetic construct
  misc_feature 1..27: note = B2M gRNA target site sequence
  source 1..27: mol_type = other DNA
tttgttattattttttgtagagaccag

SEQ ID NO: 483 - DNA, 27 bp, synthetic construct
  misc_feature 1..27: note = B2M gRNA target site sequence
  source 1..27: mol_type = other DNA
ttttgttattattttttgtagagacca

SEQ ID NO: 484 - DNA, 27 bp, synthetic construct
  misc_feature 1..27: note = B2M gRNA target site sequence
  source 1..27: mol_type = other DNA
tttttgttattattttttgtagagacc

SEQ ID NO: 485 - DNA, 27 bp, synthetic construct
  misc_feature 1..27: note = B2M gRNA target site sequence
  source 1..27: mol_type = other DNA
ttttgagctatcatggcgccagtgcac

SEQ ID NO: 486 - DNA, 27 bp, synthetic construct
  misc_feature 1..27: note = B2M gRNA target site sequence
  source 1..27: mol_type = other DNA
tttgagctatcatggcgccagtgcact

SEQ ID NO: 487 - DNA, 27 bp, synthetic construct
  misc_feature 1..27: note = B2M gRNA target site sequence
  source 1..27: mol_type = other DNA
tttgagagacagggtctcgctctgttg

SEQ ID NO: 488 - DNA, 27 bp, synthetic construct
  misc_feature 1..27: note = B2M gRNA target site sequence
  source 1..27: mol_type = other DNA
ttttgagagacagggtctcgctctgtt

SEQ ID NO: 489 - DNA, 27 bp, synthetic construct
  misc_feature 1..27: note = B2M gRNA target site sequence
  source 1..27: mol_type = other DNA
tttttgagagacagggtctcgctctgt

SEQ ID NO: 490 - DNA, 27 bp, synthetic construct
  misc_feature 1..27: note = B2M gRNA target site sequence
  source 1..27: mol_type = other DNA
ttttttgagagacagggtctcgctctg

SEQ ID NO: 491 - DNA, 27 bp, synthetic construct
  misc_feature 1..27: note = B2M gRNA target site sequence
  source 1..27: mol_type = other DNA
tttcttttttgagagacagggtctcgc

SEQ ID NO: 492 - DNA, 27 bp, synthetic construct
  misc_feature 1..27: note = B2M gRNA target site sequence
  source 1..27: mol_type = other DNA
ttttcttttttgagagacagggtctcg

SEQ ID NO: 493 - DNA, 27 bp, synthetic construct
  misc_feature 1..27: note = B2M gRNA target site sequence
  source 1..27: mol_type = other DNA
tttttcttttttgagagacagggtctc

SEQ ID NO: 494 - DNA, 27 bp, synthetic construct
  misc_feature 1..27: note = B2M gRNA target site sequence
  source 1..27: mol_type = other DNA
ttttttcttttttgagagacagggtct

SEQ ID NO: 495 - DNA, 27 bp, synthetic construct
  misc_feature 1..27: note = B2M gRNA target site sequence
  source 1..27: mol_type = other DNA
tttttttcttttttgagagacagggtc

SEQ ID NO: 496 - DNA, 27 bp, synthetic construct
  misc_feature 1..27: note = B2M gRNA target site sequence
  source 1..27: mol_type = other DNA
ttttttttcttttttgagagacagggt

SEQ ID NO: 497 - DNA, 27 bp, synthetic construct
  misc_feature 1..27: note = B2M gRNA target site sequence
  source 1..27: mol_type = other DNA
tttttttttcttttttgagagacaggg

SEQ ID NO: 498 - DNA, 27 bp, synthetic construct
  misc_feature 1..27: note = B2M gRNA target site sequence
  source 1..27: mol_type = other DNA
ttttttttttcttttttgagagacagg

SEQ ID NO: 499 - DNA, 27 bp, synthetic construct
  misc_feature 1..27: note = B2M gRNA target site sequence
  source 1..27: mol_type = other DNA
tttttttttttcttttttgagagacag

SEQ ID NO: 500 - DNA, 27 bp, synthetic construct
  misc_feature 1..27: note = B2M gRNA target site sequence
  source 1..27: mol_type = other DNA
ttttttttttttcttttttgagagaca

SEQ ID NO: 501 - DNA, 27 bp, synthetic construct
  misc_feature 1..27: note = B2M gRNA target site sequence
  source 1..27: mol_type = other DNA
tttttttttttttcttttttgagagac

SEQ ID NO: 502 - DNA, 27 bp, synthetic construct
  misc_feature 1..27: note = B2M gRNA target site sequence
  source 1..27: mol_type = other DNA
ttttttttttttttcttttttgagaga

SEQ ID NO: 503 - DNA, 27 bp, synthetic construct
  misc_feature 1..27: note = B2M gRNA target site sequence
  source 1..27: mol_type = other DNA
tttttttttttttttcttttttgagag

SEQ ID NO: 504 - DNA, 27 bp, synthetic construct
  misc_feature 1..27: note = B2M gRNA target site sequence
  source 1..27: mol_type = other DNA
tttctttttttttttttttcttttttg

SEQ ID NO: 505 - DNA, 27 bp, synthetic construct
  misc_feature 1..27: note = B2M gRNA target site sequence
  source 1..27: mol_type = other DNA
tttctctttctttttttttttttttct

SEQ ID NO: 506 - DNA, 27 bp, synthetic construct
  misc_feature 1..27: note = B2M gRNA target site sequence
  source 1..27: mol_type = other DNA
ttttctctttctttttttttttttttc

SEQ ID NO: 507 - DNA, 27 bp, synthetic construct
  misc_feature 1..27: note = B2M gRNA target site sequence
  source 1..27: mol_type = other DNA
tttcttttctctttctttttttttttt

SEQ ID NO: 508 - DNA, 27 bp, synthetic construct
  misc_feature 1..27: note = B2M gRNA target site sequence
  source 1..27: mol_type = other DNA
ttttcttttctctttcttttttttttt

SEQ ID NO: 509 - DNA, 27 bp, synthetic construct
  misc_feature 1..27: note = B2M gRNA target site sequence
  source 1..27: mol_type = other DNA
tttcttttcttttctctttcttttttt

SEQ ID NO: 510 - DNA, 27 bp, synthetic construct
  misc_feature 1..27: note = B2M gRNA target site sequence
  source 1..27: mol_type = other DNA
tttctttcttttcttttctctttcttt

SEQ ID NO: 511 - DNA, 27 bp, synthetic construct
  misc_feature 1..27: note = B2M gRNA target site sequence
  source 1..27: mol_type = other DNA
tttacagctcccctgactgacaaacct

SEQ ID NO: 512 - DNA, 27 bp, synthetic construct
  misc_feature 1..27: note = B2M gRNA target site sequence
  source 1..27: mol_type = other DNA
ttttacagctcccctgactgacaaacc

SEQ ID NO: 513 - DNA, 27 bp, synthetic construct
  misc_feature 1..27: note = B2M gRNA target site sequence
  source 1..27: mol_type = other DNA
tttgtcagtcaggggagctgtaaaacc

SEQ ID NO: 514 - DNA, 27 bp, synthetic construct
  misc_feature 1..27: note = B2M gRNA target site sequence
  source 1..27: mol_type = other DNA
tttattaatggttttacagctcccctg

SEQ ID NO: 515 - DNA, 27 bp, synthetic construct
  misc_feature 1..27: note = B2M gRNA target site sequence
  source 1..27: mol_type = other DNA
tttctaagtacctggcaatacactaag

SEQ ID NO: 516 - DNA, 27 bp, synthetic construct
  misc_feature 1..27: note = B2M gRNA target site sequence
  source 1..27: mol_type = other DNA
tttgccagaggaaaaggtgagcgcgct

SEQ ID NO: 517 - DNA, 27 bp, synthetic construct
  misc_feature 1..27: note = B2M gRNA target site sequence
  source 1..27: mol_type = other DNA
ttttgccagaggaaaaggtgagcgcgc

SEQ ID NO: 518 - DNA, 27 bp, synthetic construct
  misc_feature 1..27: note = B2M gRNA target site sequence
  source 1..27: mol_type = other DNA
ttttcctctggcaaaacatgatcgaaa

SEQ ID NO: 519 - DNA, 27 bp, synthetic construct
  misc_feature 1..27: note = B2M gRNA target site sequence
  source 1..27: mol_type = other DNA
tttcgatcatgttttgccagaggaaaa

SEQ ID NO: 520 - DNA, 27 bp, synthetic construct
  misc_feature 1..27: note = B2M gRNA target site sequence
  source 1..27: mol_type = other DNA
tttcctctggcaaaacatgatcgaaag

SEQ ID NO: 521 - DNA, 27 bp, synthetic construct
  misc_feature 1..27: note = B2M gRNA target site sequence
  source 1..27: mol_type = other DNA
tttctcatgatcaaaacattctgcttt

SEQ ID NO: 522 - DNA, 27 bp, synthetic construct
  misc_feature 1..27: note = B2M gRNA target site sequence
  source 1..27: mol_type = other DNA
ttttctcatgatcaaaacattctgctt

SEQ ID NO: 523 - DNA, 27 bp, synthetic construct
  misc_feature 1..27: note = B2M gRNA target site sequence
  source 1..27: mol_type = other DNA
ttttgatcatgagaaaattgcatttaa

SEQ ID NO: 524 - DNA, 27 bp, synthetic construct
  misc_feature 1..27: note = B2M gRNA target site sequence
  source 1..27: mol_type = other DNA
tttgatcatgagaaaattgcatttaat

SEQ ID NO: 525 - DNA, 27 bp, synthetic construct
  misc_feature 1..27: note = B2M gRNA target site sequence
  source 1..27: mol_type = other DNA
tttaatttgaatacaatttatttacaa

SEQ ID NO: 526 - DNA, 27 bp, synthetic construct
  misc_feature 1..27: note = B2M gRNA target site sequence
  source 1..27: mol_type = other DNA
tttgaatacaatttatttacaacataa

SEQ ID NO: 527 - DNA, 27 bp, synthetic construct
  misc_feature 1..27: note = B2M gRNA target site sequence
  source 1..27: mol_type = other DNA
tttatgttgtaaataaattgtattcaa

SEQ ID NO: 528 - DNA, 27 bp, synthetic construct
  misc_feature 1..27: note = B2M gRNA target site sequence
  source 1..27: mol_type = other DNA
tttatttacaacataaaggataatgta

SEQ ID NO: 529 - DNA, 27 bp, synthetic construct
  misc_feature 1..27: note = B2M gRNA target site sequence
  source 1..27: mol_type = other DNA
tttacaacataaaggataatgtatata

SEQ ID NO: 530 - DNA, 27 bp, synthetic construct
  misc_feature 1..27: note = B2M gRNA target site sequence
  source 1..27: mol_type = other DNA
tttgctggttatgttagatgtcatttt

SEQ ID NO: 531 - DNA, 27 bp, synthetic construct
  misc_feature 1..27: note = B2M gRNA target site sequence
  source 1..27: mol_type = other DNA
tttaaaatgacatctaacataaccagc

SEQ ID NO: 532 - DNA, 27 bp, synthetic construct
  misc_feature 1..27: note = B2M gRNA target site sequence
  source 1..27: mol_type = other DNA
ttttaaaatgacatctaacataaccag

SEQ ID NO: 533 - DNA, 27 bp, synthetic construct
  misc_feature 1..27: note = B2M gRNA target site sequence
  source 1..27: mol_type = other DNA
tttttaaaatgacatctaacataacca

SEQ ID NO: 534 - DNA, 27 bp, synthetic construct
  misc_feature 1..27: note = B2M gRNA target site sequence
  source 1..27: mol_type = other DNA
ttttttaaaatgacatctaacataacc

SEQ ID NO: 535 - DNA, 27 bp, synthetic construct
  misc_feature 1..27: note = B2M gRNA target site sequence
  source 1..27: mol_type = other DNA
ttttaaaaaataacaatctgatattta

SEQ ID NO: 536 - DNA, 27 bp, synthetic construct
  misc_feature 1..27: note = B2M gRNA target site sequence
  source 1..27: mol_type = other DNA
tttaaaaaataacaatctgatatttaa

SEQ ID NO: 537 - DNA, 27 bp, synthetic construct
  misc_feature 1..27: note = B2M gRNA target site sequence
  source 1..27: mol_type = other DNA
tttaaatatcagattgttattttttaa

SEQ ID NO: 538 - DNA, 27 bp, synthetic construct
  misc_feature 1..27: note = B2M gRNA target site sequence
  source 1..27: mol_type = other DNA
ttttaaatatcagattgttatttttta

SEQ ID NO: 539 - DNA, 27 bp, synthetic construct
  misc_feature 1..27: note = B2M gRNA target site sequence
  source 1..27: mol_type = other DNA
tttttaaatatcagattgttatttttt

SEQ ID NO: 540 - DNA, 27 bp, synthetic construct
  misc_feature 1..27: note = B2M gRNA target site sequence
  source 1..27: mol_type = other DNA
ttttttaaatatcagattgttattttt

SEQ ID NO: 541 - DNA, 27 bp, synthetic construct
  misc_feature 1..27: note = B2M gRNA target site sequence
  source 1..27: mol_type = other DNA
tttttttaaatatcagattgttatttt

SEQ ID NO: 542 - DNA, 27 bp, synthetic construct
  misc_feature 1..27: note = B2M gRNA target site sequence
  source 1..27: mol_type = other DNA
ttttttttaaatatcagattgttattt

SEQ ID NO: 543 - DNA, 27 bp, synthetic construct
  misc_feature 1..27: note = B2M gRNA target site sequence
  source 1..27: mol_type = other DNA
tttttttttaaatatcagattgttatt

SEQ ID NO: 544 - DNA, 27 bp, synthetic construct
  misc_feature 1..27: note = B2M gRNA target site sequence
  source 1..27: mol_type = other DNA
tttcaaaataagatttttttttaaata

SEQ ID NO: 545 - DNA, 27 bp, synthetic construct
  misc_feature 1..27: note = B2M gRNA target site sequence
  source 1..27: mol_type = other DNA
ttttcaaaataagatttttttttaaat

SEQ ID NO: 546 - DNA, 27 bp, synthetic construct
  misc_feature 1..27: note = B2M gRNA target site sequence
  source 1..27: mol_type = other DNA
tttaaaaaaaaatcttattttgaaaat

SEQ ID NO: 547 - DNA, 27 bp, synthetic construct
  misc_feature 1..27: note = B2M gRNA target site sequence
  source 1..27: mol_type = other DNA
tttggaaattttcaaaataagattttt

SEQ ID NO: 548 - DNA, 27 bp, synthetic construct
  misc_feature 1..27: note = B2M gRNA target site sequence
  source 1..27: mol_type = other DNA
ttttgaaaatttccaaagtaatacatg

SEQ ID NO: 549 - DNA, 27 bp, synthetic construct
  misc_feature 1..27: note = B2M gRNA target site sequence
  source 1..27: mol_type = other DNA
tttgaaaatttccaaagtaatacatgc

SEQ ID NO: 550 - DNA, 27 bp, synthetic construct
  misc_feature 1..27: note = B2M gRNA target site sequence
  source 1..27: mol_type = other DNA
tttccaaagtaatacatgccatgcata

SEQ ID NO: 551 - DNA, 27 bp, synthetic construct
  misc_feature 1..27: note = B2M gRNA target site sequence
  source 1..27: mol_type = other DNA
tttcttgtggtatcttccagaaatggt

SEQ ID NO: 552 - DNA, 27 bp, synthetic construct
  misc_feature 1..27: note = B2M gRNA target site sequence
  source 1..27: mol_type = other DNA
tttctggaagataccacaagaaacatg

SEQ ID NO: 553 - DNA, 27 bp, synthetic construct
  misc_feature 1..27: note = B2M gRNA target site sequence
  source 1..27: mol_type = other DNA
ttttcctcctctgacctgtgtgtgggt

SEQ ID NO: 554 - DNA, 27 bp, synthetic construct
  misc_feature 1..27: note = B2M gRNA target site sequence
  source 1..27: mol_type = other DNA
tttcctcctctgacctgtgtgtgggtt

SEQ ID NO: 555 - DNA, 27 bp, synthetic construct
  misc_feature 1..27: note = B2M gRNA target site sequence
  source 1..27: mol_type = other DNA
ttttgtttttgttttactgtgggcata

SEQ ID NO: 556 - DNA, 27 bp, synthetic construct
  misc_feature 1..27: note = B2M gRNA target site sequence
  source 1..27: mol_type = other DNA
tttgtttttgttttactgtgggcataa

SEQ ID NO: 557 - DNA, 27 bp, synthetic construct
  misc_feature 1..27: note = B2M gRNA target site sequence
  source 1..27: mol_type = other DNA
tttatgcccacagtaaaacaaaaacaa

SEQ ID NO: 558 - DNA, 27 bp, synthetic construct
  misc_feature 1..27: note = B2M gRNA target site sequence
  source 1..27: mol_type = other DNA
tttttgttttactgtgggcataaatta

SEQ ID NO: 559 - DNA, 27 bp, synthetic construct
  misc_feature 1..27: note = B2M gRNA target site sequence
  source 1..27: mol_type = other DNA
ttttgttttactgtgggcataaattaa

SEQ ID NO: 560 - DNA, 27 bp, synthetic construct
  misc_feature 1..27: note = B2M gRNA target site sequence
  source 1..27: mol_type = other DNA
tttgttttactgtgggcataaattaat

SEQ ID NO: 561 - DNA, 27 bp, synthetic construct
  misc_feature 1..27: note = B2M gRNA target site sequence
  source 1..27: mol_type = other DNA
ttttactgtgggcataaattaattttt

SEQ ID NO: 562 - DNA, 27 bp, synthetic construct
  misc_feature 1..27: note = B2M gRNA target site sequence
  source 1..27: mol_type = other DNA
tttactgtgggcataaattaatttttc

SEQ ID NO: 563 - DNA, 27 bp, synthetic construct
  misc_feature 1..27: note = B2M gRNA target site sequence
  source 1..27: mol_type = other DNA
tttttcagttaagttttggaagcttaa

SEQ ID NO: 564 - DNA, 27 bp, synthetic construct
  misc_feature 1..27: note = B2M gRNA target site sequence
  source 1..27: mol_type = other DNA
ttttcagttaagttttggaagcttaaa

SEQ ID NO: 565 - DNA, 27 bp, synthetic construct
  misc_feature 1..27: note = B2M gRNA target site sequence
  source 1..27: mol_type = other DNA
tttaagcttccaaaacttaactgaaaa

SEQ ID NO: 566 - DNA, 27 bp, synthetic construct
  misc_feature 1..27: note = B2M gRNA target site sequence
  source 1..27: mol_type = other DNA
tttcagttaagttttggaagcttaaat

SEQ ID NO: 567 - DNA, 27 bp, synthetic construct
  misc_feature 1..27: note = B2M gRNA target site sequence
  source 1..27: mol_type = other DNA
ttttggaagcttaaataactctccaaa

SEQ ID NO: 568 - DNA, 27 bp, synthetic construct
  misc_feature 1..27: note = B2M gRNA target site sequence
  source 1..27: mol_type = other DNA
tttggagagttatttaagcttccaaaa

SEQ ID NO: 569 - DNA, 27 bp, synthetic construct
  misc_feature 1..27: note = B2M gRNA target site sequence
  source 1..27: mol_type = other DNA
tttggaagcttaaataactctccaaaa

SEQ ID NO: 570 - DNA, 27 bp, synthetic construct
  misc_feature 1..27: note = B2M gRNA target site sequence
  source 1..27: mol_type = other DNA
ttttggagagttatttaagcttccaaa

SEQ ID NO: 571 - DNA, 27 bp, synthetic construct
  misc_feature 1..27: note = B2M gRNA target site sequence
  source 1..27: mol_type = other DNA
tttatgacttttggagagttatttaag

SEQ ID NO: 572 - DNA, 27 bp, synthetic construct
  misc_feature 1..27: note = B2M gRNA target site sequence
  source 1..27: mol_type = other DNA
tttgggctcaaccagttactggcttta

SEQ ID NO: 573 - DNA, 27 bp, synthetic construct
  misc_feature 1..27: note = B2M gRNA target site sequence
  source 1..27: mol_type = other DNA
tttgaatttgggctcaaccagttactg

SEQ ID NO: 574 - DNA, 27 bp, synthetic construct
  misc_feature 1..27: note = B2M gRNA target site sequence
  source 1..27: mol_type = other DNA
tttctaagaagaggacaagtatcagac

SEQ ID NO: 575 - DNA, 27 bp, synthetic construct
  misc_feature 1..27: note = B2M gRNA target site sequence
  source 1..27: mol_type = other DNA
ttttctaagaagaggacaagtatcaga

SEQ ID NO: 576 - DNA, 27 bp, synthetic construct
  misc_feature 1..27: note = B2M gRNA target site sequence
  source 1..27: mol_type = other DNA
tttgtgagagcatcactgtaatctttt

SEQ ID NO: 577 - DNA, 27 bp, synthetic construct
  misc_feature 1..27: note = B2M gRNA target site sequence
  source 1..27: mol_type = other DNA
ttttgtgagagcatcactgtaatcttt

SEQ ID NO: 578 - DNA, 27 bp, synthetic construct
  misc_feature 1..27: note = B2M gRNA target site sequence
  source 1..27: mol_type = other DNA
tttgagggaaggcggcaagattttgtg

SEQ ID NO: 579 - DNA, 27 bp, synthetic construct
  misc_feature 1..27: note = B2M gRNA target site sequence
  source 1..27: mol_type = other DNA
tttaatatgttcttattattagaagct

SEQ ID NO: 580 - DNA, 27 bp, synthetic construct
  misc_feature 1..27: note = B2M gRNA target site sequence
  source 1..27: mol_type = other DNA
tttgcatctgagcttctaataataaga

SEQ ID NO: 581 - DNA, 27 bp, synthetic construct
  misc_feature 1..27: note = B2M gRNA target site sequence
  source 1..27: mol_type = other DNA
tttcataacattaaaagctaagagagc

SEQ ID NO: 582 - DNA, 27 bp, synthetic construct
  misc_feature 1..27: note = B2M gRNA target site sequence
  source 1..27: mol_type = other DNA
ttttcataacattaaaagctaagagag

SEQ ID NO: 583 - DNA, 27 bp, synthetic construct
  misc_feature 1..27: note = B2M gRNA target site sequence
  source 1..27: mol_type = other DNA
tttttcataacattaaaagctaagaga

SEQ ID NO: 584 - DNA, 27 bp, synthetic construct
  misc_feature 1..27: note = B2M gRNA target site sequence
  source 1..27: mol_type = other DNA
ttttttcataacattaaaagctaagag

SEQ ID NO: 585 - DNA, 27 bp, synthetic construct
  misc_feature 1..27: note = B2M gRNA target site sequence
  source 1..27: mol_type = other DNA
tttttttcataacattaaaagctaaga

SEQ ID NO: 586 - DNA, 27 bp, synthetic construct
  misc_feature 1..27: note = B2M gRNA target site sequence
  source 1..27: mol_type = other DNA
ttttaatgttatgaaaaaaatcaggtc

SEQ ID NO: 587 - DNA, 27 bp, synthetic construct
  misc_feature 1..27: note = B2M gRNA target site sequence
  source 1..27: mol_type = other DNA
tttaatgttatgaaaaaaatcaggtct

SEQ ID NO: 588 - DNA, 27 bp, synthetic construct
  misc_feature 1..27: note = B2M gRNA target site sequence
  source 1..27: mol_type = other DNA
tttccttaatgatagggtgtttctaga

SEQ ID NO: 589 - DNA, 27 bp, synthetic construct
  misc_feature 1..27: note = B2M gRNA target site sequence
  source 1..27: mol_type = other DNA
tttctagagagatatatctggtcaagg

SEQ ID NO: 590 - DNA, 27 bp, synthetic construct
  misc_feature 1..27: note = B2M gRNA target site sequence
  source 1..27: mol_type = other DNA
ttttagtgatcatgtaccctgaatata

SEQ ID NO: 591 - DNA, 27 bp, synthetic construct
  misc_feature 1..27: note = B2M gRNA target site sequence
  source 1..27: mol_type = other DNA
tttagtgatcatgtaccctgaatataa

SEQ ID NO: 592 - DNA, 27 bp, synthetic construct
  misc_feature 1..27: note = B2M gRNA target site sequence
  source 1..27: mol_type = other DNA
tttaaatacacttatattcagggtaca

SEQ ID NO: 593 - DNA, 27 bp, synthetic construct
  misc_feature 1..27: note = B2M gRNA target site sequence
  source 1..27: mol_type = other DNA
ttttaaatacacttatattcagggtac

SEQ ID NO: 594 - DNA, 27 bp, synthetic construct
  misc_feature 1..27: note = B2M gRNA target site sequence
  source 1..27: mol_type = other DNA
tttaaaagaattttatacacatatatt

SEQ ID NO: 595 - DNA, 27 bp, synthetic construct
  misc_feature 1..27: note = B2M gRNA target site sequence
  source 1..27: mol_type = other DNA
ttttatacacatatatttagtgtcaat

SEQ ID NO: 596 - DNA, 27 bp, synthetic construct
  misc_feature 1..27: note = B2M gRNA target site sequence
  source 1..27: mol_type = other DNA
tttatacacatatatttagtgtcaatc

SEQ ID NO: 597 - DNA, 27 bp, synthetic construct
  misc_feature 1..27: note = B2M gRNA target site sequence
  source 1..27: mol_type = other DNA
tttagtgtcaatctgtatatttagtag

SEQ ID NO: 598 - DNA, 27 bp, synthetic construct
  misc_feature 1..27: note = B2M gRNA target site sequence
  source 1..27: mol_type = other DNA
tttagtagcactaacacttctcttcat

SEQ ID NO: 599 - DNA, 27 bp, synthetic construct
  misc_feature 1..27: note = B2M gRNA target site sequence
  source 1..27: mol_type = other DNA
tttcattgaaaatgaagagaagtgtta

SEQ ID NO: 600 - DNA, 27 bp, synthetic construct
  misc_feature 1..27: note = B2M gRNA target site sequence
  source 1..27: mol_type = other DNA
ttttcattgaaaatgaagagaagtgtt

SEQ ID NO: 601 - DNA, 27 bp, synthetic construct
  misc_feature 1..27: note = B2M gRNA target site sequence
  source 1..27: mol_type = other DNA
tttttcattgaaaatgaagagaagtgt

SEQ ID NO: 602 - DNA, 27 bp, synthetic construct
  misc_feature 1..27: note = B2M gRNA target site sequence
  source 1..27: mol_type = other DNA
ttttcaatgaaaaatatagagtttata

SEQ ID NO: 603 - DNA, 27 bp, synthetic construct
  misc_feature 1..27: note = B2M gRNA target site sequence
  source 1..27: mol_type = other DNA
tttcaatgaaaaatatagagtttataa

SEQ ID NO: 604 - DNA, 27 bp, synthetic construct
  misc_feature 1..27: note = B2M gRNA target site sequence
  source 1..27: mol_type = other DNA
tttataatattttcttcccacttcccc

SEQ ID NO: 605 - DNA, 27 bp, synthetic construct
  misc_feature 1..27: note = B2M gRNA target site sequence
  source 1..27: mol_type = other DNA
ttttcttcccacttccccatggatggt

SEQ ID NO: 606 - DNA, 27 bp, synthetic construct
  misc_feature 1..27: note = B2M gRNA target site sequence
  source 1..27: mol_type = other DNA
tttcttcccacttccccatggatggtc

SEQ ID NO: 607 - DNA, 27 bp, synthetic construct
  misc_feature 1..27: note = B2M gRNA target site sequence
  source 1..27: mol_type = other DNA
tttccaaaatgagaggcatgactagac

SEQ ID NO: 608 - DNA, 27 bp, synthetic construct
  misc_feature 1..27: note = B2M gRNA target site sequence
  source 1..27: mol_type = other DNA
tttcagaaacagtactttccaaaatga

SEQ ID NO: 609 - DNA, 27 bp, synthetic construct
  misc_feature 1..27: note = B2M gRNA target site sequence
  source 1..27: mol_type = other DNA
ttttggaaagtactgtttctgaaacat

SEQ ID NO: 610 - DNA, 27 bp, synthetic construct
  misc_feature 1..27: note = B2M gRNA target site sequence
  source 1..27: mol_type = other DNA
tttggaaagtactgtttctgaaacatt

SEQ ID NO: 611 - DNA, 27 bp, synthetic construct
  misc_feature 1..27: note = B2M gRNA target site sequence
  source 1..27: mol_type = other DNA
tttctgaaacattaggcaatatattcc

SEQ ID NO: 612 - DNA, 27 bp, synthetic construct
  misc_feature 1..27: note = B2M gRNA target site sequence
  source 1..27: mol_type = other DNA
tttacagcaatcacctgtggatgctaa

SEQ ID NO: 613 - DNA, 27 bp, synthetic construct
  misc_feature 1..27: note = B2M gRNA target site sequence
  source 1..27: mol_type = other DNA
tttaattagcatccacaggtgattgct

SEQ ID NO: 614 - DNA, 27 bp, synthetic construct
  misc_feature 1..27: note = B2M gRNA target site sequence
  source 1..27: mol_type = other DNA
ttttaattagcatccacaggtgattgc

SEQ ID NO: 615 - DNA, 27 bp, synthetic construct
  misc_feature 1..27: note = B2M gRNA target site sequence
  source 1..27: mol_type = other DNA
tttgcgttttaattagcatccacaggt

SEQ ID NO: 616 - DNA, 27 bp, synthetic construct
  misc_feature 1..27: note = B2M gRNA target site sequence
  source 1..27: mol_type = other DNA
tttccattatgatcaaatggagtaatg

SEQ ID NO: 617 - DNA, 27 bp, synthetic construct
  misc_feature 1..27: note = B2M gRNA target site sequence
  source 1..27: mol_type = other DNA
tttgatcataatggaaagtatgttctg

SEQ ID NO: 618 - DNA, 27 bp, synthetic construct
  misc_feature 1..27: note = B2M gRNA target site sequence
  source 1..27: mol_type = other DNA
tttgccatagtcctcacctatccctgt

SEQ ID NO: 619 - DNA, 27 bp, synthetic construct
  misc_feature 1..27: note = B2M gRNA target site sequence
  source 1..27: mol_type = other DNA
ttttatcgggtccaactcaaccattta

SEQ ID NO: 620 - DNA, 27 bp, synthetic construct
  misc_feature 1..27: note = B2M gRNA target site sequence
  source 1..27: mol_type = other DNA
tttatcgggtccaactcaaccatttaa

SEQ ID NO: 621 - DNA, 27 bp, synthetic construct
  misc_feature 1..27: note = B2M gRNA target site sequence
  source 1..27: mol_type = other DNA
tttaaggtatttgccagctcttgtatg

SEQ ID NO: 622 - DNA, 27 bp, synthetic construct
  misc_feature 1..27: note = B2M gRNA target site sequence
  source 1..27: mol_type = other DNA
tttgccagctcttgtatgcatttaggt

SEQ ID NO: 623 - DNA, 27 bp, synthetic construct
  misc_feature 1..27: note = B2M gRNA target site sequence
  source 1..27: mol_type = other DNA
tttaggttttgtttctttgttttttag

SEQ ID NO: 624 - DNA, 27 bp, synthetic construct
  misc_feature 1..27: note = B2M gRNA target site sequence
  source 1..27: mol_type = other DNA
ttttgtttctttgttttttagctcatg

SEQ ID NO: 625 - DNA, 27 bp, synthetic construct
  misc_feature 1..27: note = B2M gRNA target site sequence
  source 1..27: mol_type = other DNA
tttgtttctttgttttttagctcatga

SEQ ID NO: 626 - DNA, 27 bp, synthetic construct
  misc_feature 1..27: note = B2M gRNA target site sequence
  source 1..27: mol_type = other DNA
tttcatgagctaaaaaacaaagaaaca

SEQ ID NO: 627 - DNA, 27 bp, synthetic construct
  misc_feature 1..27: note = B2M gRNA target site sequence
  source 1..27: mol_type = other DNA
tttctttgttttttagctcatgaaatt

SEQ ID NO: 628 - DNA, 27 bp, synthetic construct
  misc_feature 1..27: note = B2M gRNA target site sequence
  source 1..27: mol_type = other DNA
tttgttttttagctcatgaaattaggt

SEQ ID NO: 629 - DNA, 27 bp, synthetic construct
  misc_feature 1..27: note = B2M gRNA target site sequence
  source 1..27: mol_type = other DNA
ttttttagctcatgaaattaggtacaa

SEQ ID NO: 630 - DNA, 27 bp, synthetic construct
  misc_feature 1..27: note = B2M gRNA target site sequence
  source 1..27: mol_type = other DNA
tttttagctcatgaaattaggtacaaa

SEQ ID NO: 631 - DNA, 27 bp, synthetic construct
  misc_feature 1..27: note = B2M gRNA target site sequence
  source 1..27: mol_type = other DNA
tttgtacctaatttcatgagctaaaaa

SEQ ID NO: 632 - DNA, 27 bp, synthetic construct
  misc_feature 1..27: note = B2M gRNA target site sequence
  source 1..27: mol_type = other DNA
ttttagctcatgaaattaggtacaaag

SEQ ID NO: 633 - DNA, 27 bp, synthetic construct
  misc_feature 1..27: note = B2M gRNA target site sequence
  source 1..27: mol_type = other DNA
tttagctcatgaaattaggtacaaagt

SEQ ID NO: 634 - DNA, 27 bp, synthetic construct
  misc_feature 1..27: note = B2M gRNA target site sequence
  source 1..27: mol_type = other DNA
tttatatgccagacccctctctgactt

SEQ ID NO: 635 - DNA, 27 bp, synthetic construct
  misc_feature 1..27: note = B2M gRNA target site sequence
  source 1..27: mol_type = other DNA
ttttatatgccagacccctctctgact

SEQ ID NO: 636 - DNA, 27 bp, synthetic construct
  misc_feature 1..27: note = B2M gRNA target site sequence
  source 1..27: mol_type = other DNA
tttctgctgaggttttatatgccagac

SEQ ID NO: 637 - DNA, 27 bp, synthetic construct
  misc_feature 1..27: note = B2M gRNA target site sequence
  source 1..27: mol_type = other DNA
tttatttctgctgaggttttatatgcc

SEQ ID NO: 638 - DNA, 27 bp, synthetic construct
  misc_feature 1..27: note = B2M gRNA target site sequence
  source 1..27: mol_type = other DNA
ttttgttgtttggtaagaacatacctt

SEQ ID NO: 639 - DNA, 27 bp, synthetic construct
  misc_feature 1..27: note = B2M gRNA target site sequence
  source 1..27: mol_type = other DNA
tttgttgtttggtaagaacataccttg

SEQ ID NO: 640 - DNA, 27 bp, synthetic construct
  misc_feature 1..27: note = B2M gRNA target site sequence
  source 1..27: mol_type = other DNA
tttggtaagaacataccttgggttggt

SEQ ID NO: 641 - DNA, 27 bp, synthetic construct
  misc_feature 1..27: note = B2M gRNA target site sequence
  source 1..27: mol_type = other DNA
tttgggaggccaaggcaggctgatcac

SEQ ID NO: 642 - DNA, 27 bp, synthetic construct
  misc_feature 1..27: note = B2M gRNA target site sequence
  source 1..27: mol_type = other DNA
tttcaccatgttggccaggctggtctt

SEQ ID NO: 643 - DNA, 27 bp, synthetic construct
  misc_feature 1..27: note = B2M gRNA target site sequence
  source 1..27: mol_type = other DNA
tttcagtagagacgggatttcaccatg

SEQ ID NO: 644 - DNA, 27 bp, synthetic construct
  misc_feature 1..27: note = B2M gRNA target site sequence
  source 1..27: mol_type = other DNA
ttttcagtagagacgggatttcaccat

SEQ ID NO: 645 - DNA, 27 bp, synthetic construct
  misc_feature 1..27: note = B2M gRNA target site sequence
  source 1..27: mol_type = other DNA
tttgtattttcagtagagacgggattt

SEQ ID NO: 646 - DNA, 27 bp, synthetic construct
  misc_feature 1..27: note = B2M gRNA target site sequence
  source 1..27: mol_type = other DNA
ttttgtattttcagtagagacgggatt

SEQ ID NO: 647 - DNA, 27 bp, synthetic construct
  misc_feature 1..27: note = B2M gRNA target site sequence
  source 1..27: mol_type = other DNA
tttttgtattttcagtagagacgggat

SEQ ID NO: 648 - DNA, 27 bp, synthetic construct
  misc_feature 1..27: note = B2M gRNA target site sequence
  source 1..27: mol_type = other DNA
tttgggatggaatctcattccattgcc

SEQ ID NO: 649 - DNA, 27 bp, synthetic construct
  misc_feature 1..27: note = B2M gRNA target site sequence
  source 1..27: mol_type = other DNA
ttttgggatggaatctcattccattgc

SEQ ID NO: 650 - DNA, 27 bp, synthetic construct
  misc_feature 1..27: note = B2M gRNA target site sequence
  source 1..27: mol_type = other DNA
tttttgggatggaatctcattccattg

SEQ ID NO: 651 - DNA, 27 bp, synthetic construct
  misc_feature 1..27: note = B2M gRNA target site sequence
  source 1..27: mol_type = other DNA
ttttttgggatggaatctcattccatt

SEQ ID NO: 652 - DNA, 27 bp, synthetic construct
  misc_feature 1..27: note = B2M gRNA target site sequence
  source 1..27: mol_type = other DNA
tttattttttgggatggaatctcattc

SEQ ID NO: 653 - DNA, 27 bp, synthetic construct
  misc_feature 1..27: note = B2M gRNA target site sequence
  source 1..27: mol_type = other DNA
ttttattttttgggatggaatctcatt

SEQ ID NO: 654 - DNA, 27 bp, synthetic construct
  misc_feature 1..27: note = B2M gRNA target site sequence
  source 1..27: mol_type = other DNA
tttttattttttgggatggaatctcat

SEQ ID NO: 655 - DNA, 27 bp, synthetic construct
  misc_feature 1..27: note = B2M gRNA target site sequence
  source 1..27: mol_type = other DNA
ttttttattttttgggatggaatctca

SEQ ID NO: 656 - DNA, 27 bp, synthetic construct
  misc_feature 1..27: note = B2M gRNA target site sequence
  source 1..27: mol_type = other DNA
tttttttattttttgggatggaatctc

SEQ ID NO: 657 - DNA, 27 bp, synthetic construct
  misc_feature 1..27: note = B2M gRNA target site sequence
  source 1..27: mol_type = other DNA
tttatttttttattttttgggatggaa

SEQ ID NO: 658 - DNA, 27 bp, synthetic construct
  misc_feature 1..27: note = B2M gRNA target site sequence
  source 1..27: mol_type = other DNA
ttttatttttttattttttgggatgga

SEQ ID NO: 659 - DNA, 27 bp, synthetic construct
  misc_feature 1..27: note = B2M gRNA target site sequence
  source 1..27: mol_type = other DNA
tttttatttttttattttttgggatgg

SEQ ID NO: 660 - DNA, 27 bp, synthetic construct
  misc_feature 1..27: note = B2M gRNA target site sequence
  source 1..27: mol_type = other DNA
ttttttatttttttattttttgggatg

SEQ ID NO: 661 - DNA, 27 bp, synthetic construct
  misc_feature 1..27: note = B2M gRNA target site sequence
  source 1..27: mol_type = other DNA
tttttttatttttttattttttgggat

SEQ ID NO: 662 - DNA, 27 bp, synthetic construct
  misc_feature 1..27: note = B2M gRNA target site sequence
  source 1..27: mol_type = other DNA
tttatttttttatttttttattttttg

SEQ ID NO: 663 - DNA, 27 bp, synthetic construct
  misc_feature 1..27: note = B2M gRNA target site sequence
  source 1..27: mol_type = other DNA
tttctaaactgtatgaagtgtctagta

SEQ ID NO: 664 - DNA, 27 bp, synthetic construct
  misc_feature 1..27: note = B2M gRNA target site sequence
  source 1..27: mol_type = other DNA
ttttctaaactgtatgaagtgtctagt

SEQ ID NO: 665 - DNA, 27 bp, synthetic construct
  misc_feature 1..27: note = B2M gRNA target site sequence
  source 1..27: mol_type = other DNA
tttagaaaatcagatgggtgtagatca

SEQ ID NO: 666 - DNA, 27 bp, synthetic construct
  misc_feature 1..27: note = B2M gRNA target site sequence
  source 1..27: mol_type = other DNA
tttggttcctgctcctgccttgatcta

SEQ ID NO: 667 - DNA, 27 bp, synthetic construct
  misc_feature 1..27: note = B2M gRNA target site sequence
  source 1..27: mol_type = other DNA
ttttggttcctgctcctgccttgatct

SEQ ID NO: 668 - DNA, 27 bp, synthetic construct
  misc_feature 1..27: note = B2M gRNA target site sequence
  source 1..27: mol_type = other DNA
tttttggttcctgctcctgccttgatc

SEQ ID NO: 669 - DNA, 27 bp, synthetic construct
  misc_feature 1..27: note = B2M gRNA target site sequence
  source 1..27: mol_type = other DNA
tttctttttggttcctgctcctgcctt

SEQ ID NO: 670 - DNA, 27 bp, synthetic construct
  misc_feature 1..27: note = B2M gRNA target site sequence
  source 1..27: mol_type = other DNA
tttatgcctttctttttggttcctgct

SEQ ID NO: 671 - DNA, 27 bp, synthetic construct
  misc_feature 1..27: note = B2M gRNA target site sequence
  source 1..27: mol_type = other DNA
tttcttatgtttatgcctttctttttg

SEQ ID NO: 672 - DNA, 27 bp, synthetic construct
  misc_feature 1..27: note = B2M gRNA target site sequence
  source 1..27: mol_type = other DNA
ttttcttatgtttatgcctttcttttt

SEQ ID NO: 673 - DNA, 27 bp, synthetic construct
  misc_feature 1..27: note = B2M gRNA target site sequence
  source 1..27: mol_type = other DNA
tttttcttatgtttatgcctttctttt

SEQ ID NO: 674 - DNA, 27 bp, synthetic construct
  misc_feature 1..27: note = B2M gRNA target site sequence
  source 1..27: mol_type = other DNA
ttttttcttatgtttatgcctttcttt

SEQ ID NO: 675 - DNA, 27 bp, synthetic construct
  misc_feature 1..27: note = B2M gRNA target site sequence
  source 1..27: mol_type = other DNA
tttttttcttatgtttatgcctttctt

SEQ ID NO: 676 - DNA, 27 bp, synthetic construct
  misc_feature 1..27: note = B2M gRNA target site sequence
  source 1..27: mol_type = other DNA
ttttttttcttatgtttatgcctttct

SEQ ID NO: 677 - DNA, 27 bp, synthetic construct
  misc_feature 1..27: note = B2M gRNA target site sequence
  source 1..27: mol_type = other DNA
tttccaccccttccattttttttctta

SEQ ID NO: 678 - DNA, 27 bp, synthetic construct
  misc_feature 1..27: note = B2M gRNA target site sequence
  source 1..27: mol_type = other DNA
tttgatgggggctattatgaactgaga

SEQ ID NO: 679 - DNA, 27 bp, synthetic construct
  misc_feature 1..27: note = B2M gRNA target site sequence
  source 1..27: mol_type = other DNA
tttctcagttcataatagcccccatca

SEQ ID NO: 680 - DNA, 27 bp, synthetic construct
  misc_feature 1..27: note = B2M gRNA target site sequence
  source 1..27: mol_type = other DNA
tttcaaagttcatttctcagttcataa

SEQ ID NO: 681 - DNA, 27 bp, synthetic construct
  misc_feature 1..27: note = B2M gRNA target site sequence
  source 1..27: mol_type = other DNA
ttttcaaagttcatttctcagttcata

SEQ ID NO: 682 - DNA, 27 bp, synthetic construct
  misc_feature 1..27: note = B2M gRNA target site sequence
  source 1..27: mol_type = other DNA
tttggccccaagatacttttcaaagtt

SEQ ID NO: 683 - DNA, 27 bp, synthetic construct
  misc_feature 1..27: note = B2M gRNA target site sequence
  source 1..27: mol_type = other DNA
tttgaaaagtatcttggggccaaatca

SEQ ID NO: 684 - DNA, 27 bp, synthetic construct
  misc_feature 1..27: note = B2M gRNA target site sequence
  source 1..27: mol_type = other DNA
tttctctggaggctctcaaggacttct

SEQ ID NO: 685 - DNA, 27 bp, synthetic construct
  misc_feature 1..27: note = B2M gRNA target site sequence
  source 1..27: mol_type = other DNA
tttaagagcctttctctggaggctctc

SEQ ID NO: 686 - DNA, 27 bp, synthetic construct
  misc_feature 1..27: note = B2M gRNA target site sequence
  source 1..27: mol_type = other DNA
ttttaagagcctttctctggaggctct

SEQ ID NO: 687 - DNA, 27 bp, synthetic construct
  misc_feature 1..27: note = B2M gRNA target site sequence
  source 1..27: mol_type = other DNA
tttttaagagcctttctctggaggctc

SEQ ID NO: 688 - DNA, 27 bp, synthetic construct
  misc_feature 1..27: note = B2M gRNA target site sequence
  source 1..27: mol_type = other DNA
tttctagcagtatcttctgtcactgga

SEQ ID NO: 689 - DNA, 27 bp, synthetic construct
  misc_feature 1..27: note = B2M gRNA target site sequence
  source 1..27: mol_type = other DNA
tttctagcagatttctagcagtatctt

SEQ ID NO: 690 - DNA, 27 bp, synthetic construct
  misc_feature 1..27: note = B2M gRNA target site sequence
  source 1..27: mol_type = other DNA
ttttctagcagatttctagcagtatct

SEQ ID NO: 691 - DNA, 27 bp, synthetic construct
  misc_feature 1..27: note = B2M gRNA target site sequence
  source 1..27: mol_type = other DNA
tttttctagcagatttctagcagtatc

SEQ ID NO: 692 - DNA, 27 bp, synthetic construct
  misc_feature 1..27: note = B2M gRNA target site sequence
  source 1..27: mol_type = other DNA
ttttttctagcagatttctagcagtat

SEQ ID NO: 693 - DNA, 27 bp, synthetic construct
  misc_feature 1..27: note = B2M gRNA target site sequence
  source 1..27: mol_type = other DNA
tttttttctagcagatttctagcagta

SEQ ID NO: 694 - DNA, 27 bp, synthetic construct
  misc_feature 1..27: note = B2M gRNA target site sequence
  source 1..27: mol_type = other DNA
ttttttttctagcagatttctagcagt

SEQ ID NO: 695 - DNA, 27 bp, synthetic construct
  misc_feature 1..27: note = B2M gRNA target site sequence
  source 1..27: mol_type = other DNA
tttgttttttttctagcagatttctag

SEQ ID NO: 696 - DNA, 27 bp, synthetic construct
  misc_feature 1..27: note = B2M gRNA target site sequence
  source 1..27: mol_type = other DNA
ttttgttttttttctagcagatttcta

SEQ ID NO: 697 - DNA, 27 bp, synthetic construct
  misc_feature 1..27: note = B2M gRNA target site sequence
  source 1..27: mol_type = other DNA
tttttgttttttttctagcagatttct

SEQ ID NO: 698 - DNA, 27 bp, synthetic construct
  misc_feature 1..27: note = B2M gRNA target site sequence
  source 1..27: mol_type = other DNA
ttttttgttttttttctagcagatttc

SEQ ID NO: 699 - DNA, 27 bp, synthetic construct
  misc_feature 1..27: note = B2M gRNA target site sequence
  source 1..27: mol_type = other DNA
tttccctcataattcctctatacatgc

SEQ ID NO: 700 - DNA, 27 bp, synthetic construct
  misc_feature 1..27: note = B2M gRNA target site sequence
  source 1..27: mol_type = other DNA
tttgaagaataaaccgtgacttggtat

SEQ ID NO: 701 - DNA, 27 bp, synthetic construct
  misc_feature 1..27: note = B2M gRNA target site sequence
  source 1..27: mol_type = other DNA
ttttgaagaataaaccgtgacttggta

SEQ ID NO: 702 - DNA, 27 bp, synthetic construct
  misc_feature 1..27: note = B2M gRNA target site sequence
  source 1..27: mol_type = other DNA
tttattcttcaaaatggaggtggcttg

SEQ ID NO: 703 - DNA, 27 bp, synthetic construct
  misc_feature 1..27: note = B2M gRNA target site sequence
  source 1..27: mol_type = other DNA
tttccactctggccaaatgagcttcca

SEQ ID NO: 704 - DNA, 27 bp, synthetic construct
  misc_feature 1..27: note = B2M gRNA target site sequence
  source 1..27: mol_type = other DNA
tttggccagagtggaaatggaattggg

SEQ ID NO: 705 - DNA, 27 bp, synthetic construct
  misc_feature 1..27: note = B2M gRNA target site sequence
  source 1..27: mol_type = other DNA
tttctcccaattccatttccactctgg

SEQ ID NO: 706 - DNA, 27 bp, synthetic construct
  misc_feature 1..27: note = B2M gRNA target site sequence
  source 1..27: mol_type = other DNA
tttggtcatcgatttctcccaattcca

SEQ ID NO: 707 - DNA, 27 bp, synthetic construct
  misc_feature 1..27: note = B2M gRNA target site sequence
  source 1..27: mol_type = other DNA
tttacatttggtcatcgatttctccca

SEQ ID NO: 708 - DNA, 27 bp, synthetic construct
  misc_feature 1..27: note = B2M gRNA target site sequence
  source 1..27: mol_type = other DNA
tttcacttggggctaacttggtgtcaa

SEQ ID NO: 709 - DNA, 27 bp, synthetic construct
  misc_feature 1..27: note = B2M gRNA target site sequence
  source 1..27: mol_type = other DNA
ttttcccgatattcctcaggtactcca

SEQ ID NO: 710 - DNA, 27 bp, synthetic construct
  misc_feature 1..27: note = B2M gRNA target site sequence
  source 1..27: mol_type = other DNA
tttcccgatattcctcaggtactccaa

SEQ ID NO: 711 - DNA, 27 bp, synthetic construct
  misc_feature 1..27: note = B2M gRNA target site sequence
  source 1..27: mol_type = other DNA
tttggagtacctgaggaatatcgggaa

SEQ ID NO: 712 - DNA, 27 bp, synthetic construct
  misc_feature 1..27: note = B2M gRNA target site sequence
  source 1..27: mol_type = other DNA
tttactcacgtcatccagcagagaatg

SEQ ID NO: 713 - DNA, 27 bp, synthetic construct
  misc_feature 1..27: note = B2M gRNA target site sequence
  source 1..27: mol_type = other DNA
tttccattctctgctggatgacgtgag

SEQ ID NO: 714 - DNA, 27 bp, synthetic construct
  misc_feature 1..27: note = B2M gRNA target site sequence
  source 1..27: mol_type = other DNA
tttgactttccattctctgctggatga

SEQ ID NO: 715 - DNA, 27 bp, synthetic construct
  misc_feature 1..27: note = B2M gRNA target site sequence
  source 1..27: mol_type = other DNA
tttcctgaattgctatgtgtctgggtt

SEQ ID NO: 716 - DNA, 27 bp, synthetic construct
  misc_feature 1..27: note = B2M gRNA target site sequence
  source 1..27: mol_type = other DNA
tttcatccatccgacattgaagttgac

SEQ ID NO: 717 - DNA, 27 bp, synthetic construct
  misc_feature 1..27: note = B2M gRNA target site sequence
  source 1..27: mol_type = other DNA
tttcaattctctctccattcttcagta

SEQ ID NO: 718 - DNA, 27 bp, synthetic construct
  misc_feature 1..27: note = B2M gRNA target site sequence
  source 1..27: mol_type = other DNA
ttttcaattctctctccattcttcagt

SEQ ID NO: 719 - DNA, 27 bp, synthetic construct
  misc_feature 1..27: note = B2M gRNA target site sequence
  source 1..27: mol_type = other DNA
tttttcaattctctctccattcttcag

SEQ ID NO: 720 - DNA, 27 bp, synthetic construct
  misc_feature 1..27: note = B2M gRNA target site sequence
  source 1..27: mol_type = other DNA
tttcagcaaggactggtctttctatct

SEQ ID NO: 721 - DNA, 27 bp, synthetic construct
  misc_feature 1..27: note = B2M gRNA target site sequence
  source 1..27: mol_type = other DNA
tttctatctcttgtactacactgaatt

SEQ ID NO: 722 - DNA, 27 bp, synthetic construct
  misc_feature 1..27: note = B2M gRNA target site sequence
  source 1..27: mol_type = other DNA
tttcagtgggggtgaattcagtgtagt

SEQ ID NO: 723 - DNA, 27 bp, synthetic construct
  misc_feature 1..27: note = B2M gRNA target site sequence
  source 1..27: mol_type = other DNA
ttttcagtgggggtgaattcagtgtag

SEQ ID NO: 724 - DNA, 27 bp, synthetic construct
  misc_feature 1..27: note = B2M gRNA target site sequence
  source 1..27: mol_type = other DNA
tttttcagtgggggtgaattcagtgta

SEQ ID NO: 725 - DNA, 27 bp, synthetic construct
  misc_feature 1..27: note = B2M gRNA target site sequence
  source 1..27: mol_type = other DNA
tttgtcacagcccaagatagttaagtg

SEQ ID NO: 726 - DNA, 27 bp, synthetic construct
  misc_feature 1..27: note = B2M gRNA target site sequence
  source 1..27: mol_type = other DNA
tttcagcagcttacaaaagaatgtaag

SEQ ID NO: 727 - DNA, 27 bp, synthetic construct
  misc_feature 1..27: note = B2M gRNA target site sequence
  source 1..27: mol_type = other DNA
ttttgtaagctgctgaaagttgtgtat

SEQ ID NO: 728 - DNA, 27 bp, synthetic construct
  misc_feature 1..27: note = B2M gRNA target site sequence
  source 1..27: mol_type = other DNA
tttgtaagctgctgaaagttgtgtatg

SEQ ID NO: 729 - DNA, 27 bp, synthetic construct
  misc_feature 1..27: note = B2M gRNA target site sequence
  source 1..27: mol_type = other DNA
tttatgatatgactactcatacacaac

SEQ ID NO: 730 - DNA, 27 bp, synthetic construct
  misc_feature 1..27: note = B2M gRNA target site sequence
  source 1..27: mol_type = other DNA
tttatatcaaagcagctttatgatatg

SEQ ID NO: 731 - DNA, 27 bp, synthetic construct
  misc_feature 1..27: note = B2M gRNA target site sequence
  source 1..27: mol_type = other DNA
ttttatatcaaagcagctttatgatat

SEQ ID NO: 732 - DNA, 27 bp, synthetic construct
  misc_feature 1..27: note = B2M gRNA target site sequence
  source 1..27: mol_type = other DNA
tttttatatcaaagcagctttatgata

SEQ ID NO: 733 - DNA, 27 bp, synthetic construct
  misc_feature 1..27: note = B2M gRNA target site sequence
  source 1..27: mol_type = other DNA
ttttttatatcaaagcagctttatgat

SEQ ID NO: 734 - DNA, 27 bp, synthetic construct
  misc_feature 1..27: note = B2M gRNA target site sequence
  source 1..27: mol_type = other DNA
tttgatataaaaaaggtctatggccat

SEQ ID NO: 735 - DNA, 27 bp, synthetic construct
  misc_feature 1..27: note = B2M gRNA target site sequence
  source 1..27: mol_type = other DNA
tttatatcagatgggatgggactcatt

SEQ ID NO: 736 - DNA, 27 bp, synthetic construct
  misc_feature 1..27: note = B2M gRNA target site sequence
  source 1..27: mol_type = other DNA
tttaagaacattccctgacaatcccaa

SEQ ID NO: 737 - DNA, 27 bp, synthetic construct
  misc_feature 1..27: note = B2M gRNA target site sequence
  source 1..27: mol_type = other DNA
tttctgaaccagtagtttccctgcagt

SEQ ID NO: 738 - DNA, 27 bp, synthetic construct
  misc_feature 1..27: note = B2M gRNA target site sequence
  source 1..27: mol_type = other DNA
tttccctgcagttgagcagggagcagc

SEQ ID NO: 739 - DNA, 27 bp, synthetic construct
  misc_feature 1..27: note = B2M gRNA target site sequence
  source 1..27: mol_type = other DNA
tttgtgcaagtgctgctgctgctccct

SEQ ID NO: 740 - DNA, 27 bp, synthetic construct
  misc_feature 1..27: note = B2M gRNA target site sequence
  source 1..27: mol_type = other DNA
ttttgtggcagcttcaggtatatttag

SEQ ID NO: 741 - DNA, 27 bp, synthetic construct
  misc_feature 1..27: note = B2M gRNA target site sequence
  source 1..27: mol_type = other DNA
tttgtggcagcttcaggtatatttagc

SEQ ID NO: 742 - DNA, 27 bp, synthetic construct
  misc_feature 1..27: note = B2M gRNA target site sequence
  source 1..27: mol_type = other DNA
tttagcactgaacgaacatctcaagaa

SEQ ID NO: 743 - DNA, 27 bp, synthetic construct
  misc_feature 1..27: note = B2M gRNA target site sequence
  source 1..27: mol_type = other DNA
tttgtttgtaagtcctgctgtcctagc

SEQ ID NO: 744 - DNA, 27 bp, synthetic construct
  misc_feature 1..27: note = B2M gRNA target site sequence
  source 1..27: mol_type = other DNA
tttgtaagtcctgctgtcctagcatcc

SEQ ID NO: 745 - DNA, 27 bp, synthetic construct
  misc_feature 1..27: note = B2M gRNA target site sequence
  source 1..27: mol_type = other DNA
tttctggctggattggtatctgaggct

SEQ ID NO: 746 - DNA, 27 bp, synthetic construct
  misc_feature 1..27: note = B2M gRNA target site sequence
  source 1..27: mol_type = other DNA
tttagagctacccagcaggaacaagcc

SEQ ID NO: 747 - DNA, 27 bp, synthetic construct
  misc_feature 1..27: note = B2M gRNA target site sequence
  source 1..27: mol_type = other DNA
tttctaaccattttagacatttgttag

SEQ ID NO: 748 - DNA, 27 bp, synthetic construct
  misc_feature 1..27: note = B2M gRNA target site sequence
  source 1..27: mol_type = other DNA
ttttagacatttgttagtacatggtat

SEQ ID NO: 749 - DNA, 27 bp, synthetic construct
  misc_feature 1..27: note = B2M gRNA target site sequence
  source 1..27: mol_type = other DNA
tttagacatttgttagtacatggtatt

SEQ ID NO: 750 - DNA, 27 bp, synthetic construct
  misc_feature 1..27: note = B2M gRNA target site sequence
  source 1..27: mol_type = other DNA
tttaaaataccatgtactaacaaatgt

SEQ ID NO: 751 - DNA, 27 bp, synthetic construct
  misc_feature 1..27: note = B2M gRNA target site sequence
  source 1..27: mol_type = other DNA
ttttaaaataccatgtactaacaaatg

SEQ ID NO: 752 - DNA, 27 bp, synthetic construct
  misc_feature 1..27: note = B2M gRNA target site sequence
  source 1..27: mol_type = other DNA
tttgttagtacatggtattttaaaagt

SEQ ID NO: 753 - DNA, 27 bp, synthetic construct
  misc_feature 1..27: note = B2M gRNA target site sequence
  source 1..27: mol_type = other DNA
tttacttttaaaataccatgtactaac

SEQ ID NO: 754 - DNA, 27 bp, synthetic construct
  misc_feature 1..27: note = B2M gRNA target site sequence
  source 1..27: mol_type = other DNA
ttttacttttaaaataccatgtactaa

SEQ ID NO: 755 - DNA, 27 bp, synthetic construct
  misc_feature 1..27: note = B2M gRNA target site sequence
  source 1..27: mol_type = other DNA
ttttaaaagtaaaacttaatgtcttcc

SEQ ID NO: 756 - DNA, 27 bp, synthetic construct
  misc_feature 1..27: note = B2M gRNA target site sequence
  source 1..27: mol_type = other DNA
tttaaaagtaaaacttaatgtcttcct

SEQ ID NO: 757 - DNA, 27 bp, synthetic construct
  misc_feature 1..27: note = B2M gRNA target site sequence
  source 1..27: mol_type = other DNA
ttttttttctccactgtctttttcata

SEQ ID NO: 758 - DNA, 27 bp, synthetic construct
  misc_feature 1..27: note = B2M gRNA target site sequence
  source 1..27: mol_type = other DNA
tttttttctccactgtctttttcatag

SEQ ID NO: 759 - DNA, 27 bp, synthetic construct
  misc_feature 1..27: note = B2M gRNA target site sequence
  source 1..27: mol_type = other DNA
ttttttctccactgtctttttcataga

SEQ ID NO: 760 - DNA, 27 bp, synthetic construct
  misc_feature 1..27: note = B2M gRNA target site sequence
  source 1..27: mol_type = other DNA
tttttctccactgtctttttcatagat

SEQ ID NO: 761 - DNA, 27 bp, synthetic construct
  misc_feature 1..27: note = B2M gRNA target site sequence
  source 1..27: mol_type = other DNA
ttttctccactgtctttttcatagatc

SEQ ID NO: 762 - DNA, 27 bp, synthetic construct
  misc_feature 1..27: note = B2M gRNA target site sequence
  source 1..27: mol_type = other DNA
tttctccactgtctttttcatagatcg

SEQ ID NO: 763 - DNA, 27 bp, synthetic construct
  misc_feature 1..27: note = B2M gRNA target site sequence
  source 1..27: mol_type = other DNA
tttttcatagatcgagacatgtaagca

SEQ ID NO: 764 - DNA, 27 bp, synthetic construct
  misc_feature 1..27: note = B2M gRNA target site sequence
  source 1..27: mol_type = other DNA
ttttcatagatcgagacatgtaagcag

SEQ ID NO: 765 - DNA, 27 bp, synthetic construct
  misc_feature 1..27: note = B2M gRNA target site sequence
  source 1..27: mol_type = other DNA
tttcatagatcgagacatgtaagcagc

SEQ ID NO: 766 - DNA, 27 bp, synthetic construct
  misc_feature 1..27: note = B2M gRNA target site sequence
  source 1..27: mol_type = other DNA
tttctcaaggtcaaaaacttacctcca

SEQ ID NO: 767 - DNA, 27 bp, synthetic construct
  misc_feature 1..27: note = B2M gRNA target site sequence
  source 1..27: mol_type = other DNA
ttttctcaaggtcaaaaacttacctcc

SEQ ID NO: 768 - DNA, 27 bp, synthetic construct
  misc_feature 1..27: note = B2M gRNA target site sequence
  source 1..27: mol_type = other DNA
tttttgaccttgagaaaatgtttttgt

SEQ ID NO: 769 - DNA, 27 bp, synthetic construct
  misc_feature 1..27: note = B2M gRNA target site sequence
  source 1..27: mol_type = other DNA
ttttgaccttgagaaaatgtttttgtt

SEQ ID NO: 770 - DNA, 27 bp, synthetic construct
  misc_feature 1..27: note = B2M gRNA target site sequence
  source 1..27: mol_type = other DNA
tttgaccttgagaaaatgtttttgttt

SEQ ID NO: 771 - DNA, 27 bp, synthetic construct
  misc_feature 1..27: note = B2M gRNA target site sequence
  source 1..27: mol_type = other DNA
tttttgtttcactgtcctgaggactat

SEQ ID NO: 772 - DNA, 27 bp, synthetic construct
  misc_feature 1..27: note = B2M gRNA target site sequence
  source 1..27: mol_type = other DNA
ttttgtttcactgtcctgaggactatt

SEQ ID NO: 773 - DNA, 27 bp, synthetic construct
  misc_feature 1..27: note = B2M gRNA target site sequence
  source 1..27: mol_type = other DNA
tttgtttcactgtcctgaggactattt

SEQ ID NO: 774 - DNA, 27 bp, synthetic construct
  misc_feature 1..27: note = B2M gRNA target site sequence
  source 1..27: mol_type = other DNA
tttcactgtcctgaggactatttatag

SEQ ID NO: 775 - DNA, 27 bp, synthetic construct
  misc_feature 1..27: note = B2M gRNA target site sequence
  source 1..27: mol_type = other DNA
tttatagacagctctaacatgataacc

SEQ ID NO: 776 - DNA, 27 bp, synthetic construct
  misc_feature 1..27: note = B2M gRNA target site sequence
  source 1..27: mol_type = other DNA
tttccctgctaaaatgttactctgtca

SEQ ID NO: 777 - DNA, 27 bp, synthetic construct
  misc_feature 1..27: note = B2M gRNA target site sequence
  source 1..27: mol_type = other DNA
ttttagcagggaaagaagaatcctaca

SEQ ID NO: 778 - DNA, 27 bp, synthetic construct
  misc_feature 1..27: note = B2M gRNA target site sequence
  source 1..27: mol_type = other DNA
tttagcagggaaagaagaatcctacag

SEQ ID NO: 779 - DNA, 27 bp, synthetic construct
  misc_feature 1..27: note = B2M gRNA target site sequence
  source 1..27: mol_type = other DNA
tttgccctctctgtagagggtcagtaa

SEQ ID NO: 780 - DNA, 27 bp, synthetic construct
  misc_feature 1..27: note = B2M gRNA target site sequence
  source 1..27: mol_type = other DNA
tttatcctgcaataccatactggcagt

SEQ ID NO: 781 - DNA, 27 bp, synthetic construct
  misc_feature 1..27: note = B2M gRNA target site sequence
  source 1..27: mol_type = other DNA
tttgatctttcttctgccatttccaca

SEQ ID NO: 782 - DNA, 27 bp, synthetic construct
  misc_feature 1..27: note = B2M gRNA target site sequence
  source 1..27: mol_type = other DNA
tttcttctgccatttccacattggaca

SEQ ID NO: 783 - DNA, 27 bp, synthetic construct
  misc_feature 1..27: note = B2M gRNA target site sequence
  source 1..27: mol_type = other DNA
tttccacattggacatctctgctgagg

SEQ ID NO: 784 - DNA, 27 bp, synthetic construct
  misc_feature 1..27: note = B2M gRNA target site sequence
  source 1..27: mol_type = other DNA
tttctctcctcagcagagatgtccaat

SEQ ID NO: 785 - DNA, 27 bp, synthetic construct
  misc_feature 1..27: note = B2M gRNA target site sequence
  source 1..27: mol_type = other DNA
ttttctctcctcagcagagatgtccaa

SEQ ID NO: 786 - DNA, 27 bp, synthetic construct
  misc_feature 1..27: note = B2M gRNA target site sequence
  source 1..27: mol_type = other DNA
ttttcctttgtataatgttgttttatt

SEQ ID NO: 787 - DNA, 27 bp, synthetic construct
  misc_feature 1..27: note = B2M gRNA target site sequence
  source 1..27: mol_type = other DNA
tttcctttgtataatgttgttttattc

SEQ ID NO: 788 - DNA, 27 bp, synthetic construct
  misc_feature 1..27: note = B2M gRNA target site sequence
  source 1..27: mol_type = other DNA
tttgtataatgttgttttattcttcag

SEQ ID NO: 789 - DNA, 27 bp, synthetic construct
  misc_feature 1..27: note = B2M gRNA target site sequence
  source 1..27: mol_type = other DNA
ttttattcttcagacagaagagaggag

SEQ ID NO: 790 - DNA, 27 bp, synthetic construct
  misc_feature 1..27: note = B2M gRNA target site sequence
  source 1..27: mol_type = other DNA
tttattcttcagacagaagagaggagt

SEQ ID NO: 791 - DNA, 27 bp, synthetic construct
  misc_feature 1..27: note = B2M gRNA target site sequence
  source 1..27: mol_type = other DNA
tttgcctcttagaggttcccaggccac

SEQ ID NO: 792 - DNA, 27 bp, synthetic construct
  misc_feature 1..27: note = B2M gRNA target site sequence
  source 1..27: mol_type = other DNA
tttatctcctctagtggcctgggaacc

SEQ ID NO: 793 - DNA, 27 bp, synthetic construct
  misc_feature 1..27: note = B2M gRNA target site sequence
  source 1..27: mol_type = other DNA
tttccctttatctcctctagtggcctg

SEQ ID NO: 794 - DNA, 27 bp, synthetic construct
  misc_feature 1..27: note = B2M gRNA target site sequence
  source 1..27: mol_type = other DNA
tttggactccaactaaagatgcagaga

SEQ ID NO: 795 - DNA, 27 bp, synthetic construct
  misc_feature 1..27: note = B2M gRNA target site sequence
  source 1..27: mol_type = other DNA
tttagttggagtccaaaggcttttcaa

SEQ ID NO: 796 - DNA, 27 bp, synthetic construct
  misc_feature 1..27: note = B2M gRNA target site sequence
  source 1..27: mol_type = other DNA
tttcattgaaaagcctttggactccaa

SEQ ID NO: 797 - DNA, 27 bp, synthetic construct
  misc_feature 1..27: note = B2M gRNA target site sequence
  source 1..27: mol_type = other DNA
ttttcaatgaaattctactgcccaggg

SEQ ID NO: 798 - DNA, 27 bp, synthetic construct
  misc_feature 1..27: note = B2M gRNA target site sequence
  source 1..27: mol_type = other DNA
tttcaatgaaattctactgcccagggt

SEQ ID NO: 799 - DNA, 27 bp, synthetic construct
  misc_feature 1..27: note = B2M gRNA target site sequence
  source 1..27: mol_type = other DNA
tttcagcatcaatgtaccctgggcagt

SEQ ID NO: 800 - DNA, 27 bp, synthetic construct
  misc_feature 1..27: note = B2M gRNA target site sequence
  source 1..27: mol_type = other DNA
tttgaatggggtttcagcatcaatgta

SEQ ID NO: 801 - DNA, 27 bp, synthetic construct
  misc_feature 1..27: note = B2M gRNA target site sequence
  source 1..27: mol_type = other DNA
tttgggagagcatcaggaaggtggatg

SEQ ID NO: 802 - DNA, 27 bp, synthetic construct
  misc_feature 1..27: note = B2M gRNA target site sequence
  source 1..27: mol_type = other DNA
tttactaacagtgtgactgggcagatc

SEQ ID NO: 803 - DNA, 27 bp, synthetic construct
  misc_feature 1..27: note = B2M gRNA target site sequence
  source 1..27: mol_type = other DNA
tttctcagaacatgtccccgtcattaa

SEQ ID NO: 804 - DNA, 27 bp, synthetic construct
  misc_feature 1..27: note = B2M gRNA target site sequence
  source 1..27: mol_type = other DNA
tttgtgtaagcatttctcagaacatgt

SEQ ID NO: 805 - DNA, 27 bp, synthetic construct
  misc_feature 1..27: note = B2M gRNA target site sequence
  source 1..27: mol_type = other DNA
tttgtagtctaggagcaataggctata

SEQ ID NO: 806 - DNA, 27 bp, synthetic construct
  misc_feature 1..27: note = B2M gRNA target site sequence
  source 1..27: mol_type = other DNA
tttagatacacaaatacttaccattgt

SEQ ID NO: 807 - DNA, 27 bp, synthetic construct
  misc_feature 1..27: note = B2M gRNA target site sequence
  source 1..27: mol_type = other DNA
tttgtgtatctaaacatagaagttgca

SEQ ID NO: 808 - DNA, 27 bp, synthetic construct
  misc_feature 1..27: note = B2M gRNA target site sequence
  source 1..27: mol_type = other DNA
tttactgcaacttctatgtttagatac

SEQ ID NO: 809 - DNA, 27 bp, synthetic construct
  misc_feature 1..27: note = B2M gRNA target site sequence
  source 1..27: mol_type = other DNA
ttttactgcaacttctatgtttagata

SEQ ID NO: 810 - DNA, 27 bp, synthetic construct
  misc_feature 1..27: note = B2M gRNA target site sequence
  source 1..27: mol_type = other DNA
tttttactgcaacttctatgtttagat

SEQ ID NO: 811 - DNA, 27 bp, synthetic construct
  misc_feature 1..27: note = B2M gRNA target site sequence
  source 1..27: mol_type = other DNA
ttttaatcttatgagaccactgtcata

SEQ ID NO: 812 - DNA, 27 bp, synthetic construct
  misc_feature 1..27: note = B2M gRNA target site sequence
  source 1..27: mol_type = other DNA
tttaatcttatgagaccactgtcatat

SEQ ID NO: 813 - DNA, 27 bp, synthetic construct
  misc_feature 1..27: note = B2M gRNA target site sequence
  source 1..27: mol_type = other DNA
tttggtcaatgatggactgtatatatg

SEQ ID NO: 814 - DNA, 27 bp, synthetic construct
  misc_feature 1..27: note = B2M gRNA target site sequence
  source 1..27: mol_type = other DNA
ttttggtcaatgatggactgtatatat

SEQ ID NO: 815 - DNA, 27 bp, synthetic construct
  misc_feature 1..27: note = B2M gRNA target site sequence
  source 1..27: mol_type = other DNA
ttttttcttctaagattttgggagcac

SEQ ID NO: 816 - DNA, 27 bp, synthetic construct
  misc_feature 1..27: note = B2M gRNA target site sequence
  source 1..27: mol_type = other DNA
tttttcttctaagattttgggagcacc

SEQ ID NO: 817 - DNA, 27 bp, synthetic construct
  misc_feature 1..27: note = B2M gRNA target site sequence
  source 1..27: mol_type = other DNA
ttttcttctaagattttgggagcacca

SEQ ID NO: 818 - DNA, 27 bp, synthetic construct
  misc_feature 1..27: note = B2M gRNA target site sequence
  source 1..27: mol_type = other DNA
tttcttctaagattttgggagcaccaa

SEQ ID NO: 819 - DNA, 27 bp, synthetic construct
  misc_feature 1..27: note = B2M gRNA target site sequence
  source 1..27: mol_type = other DNA
tttggtgctcccaaaatcttagaagaa

SEQ ID NO: 820 - DNA, 27 bp, synthetic construct
  misc_feature 1..27: note = B2M gRNA target site sequence
  source 1..27: mol_type = other DNA
ttttgggagcaccaaagggatacacta

SEQ ID NO: 821 - DNA, 27 bp, synthetic construct
  misc_feature 1..27: note = B2M gRNA target site sequence
  source 1..27: mol_type = other DNA
tttgggagcaccaaagggatacactaa

SEQ ID NO: 822 - DNA, 27 bp, synthetic construct
  misc_feature 1..27: note = B2M gRNA target site sequence
  source 1..27: mol_type = other DNA
tttataatgggtttggagaactgtctg

SEQ ID NO: 823 - DNA, 27 bp, synthetic construct
  misc_feature 1..27: note = B2M gRNA target site sequence
  source 1..27: mol_type = other DNA
tttggagaactgtctgcagctacttct

SEQ ID NO: 824 - DNA, 27 bp, synthetic construct
  misc_feature 1..27: note = B2M gRNA target site sequence
  source 1..27: mol_type = other DNA
tttaaaagaagtagctgcagacagttc

SEQ ID NO: 825 - DNA, 27 bp, synthetic construct
  misc_feature 1..27: note = B2M gRNA target site sequence
  source 1..27: mol_type = other DNA
ttttaaaagaagtagctgcagacagtt

SEQ ID NO: 826 - DNA, 27 bp, synthetic construct
  misc_feature 1..27: note = B2M gRNA target site sequence
  source 1..27: mol_type = other DNA
tttttaaaagaagtagctgcagacagt

SEQ ID NO: 827 - DNA, 27 bp, synthetic construct
  misc_feature 1..27: note = B2M gRNA target site sequence
  source 1..27: mol_type = other DNA
ttttaaaaaggtgatctacacagtaga

SEQ ID NO: 828 - DNA, 27 bp, synthetic construct
  misc_feature 1..27: note = B2M gRNA target site sequence
  source 1..27: mol_type = other DNA
tttaaaaaggtgatctacacagtagaa

SEQ ID NO: 829 - DNA, 27 bp, synthetic construct
  misc_feature 1..27: note = B2M gRNA target site sequence
  source 1..27: mol_type = other DNA
tttctactgtgtagatcacctttttaa

SEQ ID NO: 830 - DNA, 27 bp, synthetic construct
  misc_feature 1..27: note = B2M gRNA target site sequence
  source 1..27: mol_type = other DNA
tttggattgcagatctcattaccaaac

SEQ ID NO: 831 - DNA, 27 bp, synthetic construct
  misc_feature 1..27: note = B2M gRNA target site sequence
  source 1..27: mol_type = other DNA
tttggtaatgagatctgcaatccaaat

SEQ ID NO: 832 - DNA, 27 bp, synthetic construct
  misc_feature 1..27: note = B2M gRNA target site sequence
  source 1..27: mol_type = other DNA
tttatttggattgcagatctcattacc

SEQ ID NO: 833 - DNA, 27 bp, synthetic construct
  misc_feature 1..27: note = B2M gRNA target site sequence
  source 1..27: mol_type = other DNA
ttttatttggattgcagatctcattac

SEQ ID NO: 834 - DNA, 27 bp, synthetic construct
  misc_feature 1..27: note = B2M gRNA target site sequence
  source 1..27: mol_type = other DNA
tttattttatttggattgcagatctca

SEQ ID NO: 835 - DNA, 27 bp, synthetic construct
  misc_feature 1..27: note = B2M gRNA target site sequence
  source 1..27: mol_type = other DNA
tttttcttttcttttcaggtttgaaga

SEQ ID NO: 836 - DNA, 27 bp, synthetic construct
  misc_feature 1..27: note = B2M gRNA target site sequence
  source 1..27: mol_type = other DNA
ttttcttttcttttcaggtttgaagat

SEQ ID NO: 837 - DNA, 27 bp, synthetic construct
  misc_feature 1..27: note = B2M gRNA target site sequence
  source 1..27: mol_type = other DNA
tttcttttcttttcaggtttgaagatg

SEQ ID NO: 838 - DNA, 27 bp, synthetic construct
  misc_feature 1..27: note = B2M gRNA target site sequence
  source 1..27: mol_type = other DNA
ttttcttttcaggtttgaagatgccgc

SEQ ID NO: 839 - DNA, 27 bp, synthetic construct
  misc_feature 1..27: note = B2M gRNA target site sequence
  source 1..27: mol_type = other DNA
tttcttttcaggtttgaagatgccgca

SEQ ID NO: 840 - DNA, 27 bp, synthetic construct
  misc_feature 1..27: note = B2M gRNA target site sequence
  source 1..27: mol_type = other DNA
ttttcaggtttgaagatgccgcatttg

SEQ ID NO: 841 - DNA, 27 bp, synthetic construct
  misc_feature 1..27: note = B2M gRNA target site sequence
  source 1..27: mol_type = other DNA
tttcaggtttgaagatgccgcatttgg

SEQ ID NO: 842 - DNA, 27 bp, synthetic construct
  misc_feature 1..27: note = B2M gRNA target site sequence
  source 1..27: mol_type = other DNA
tttgaagatgccgcatttggattggat

SEQ ID NO: 843 - DNA, 27 bp, synthetic construct
  misc_feature 1..27: note = B2M gRNA target site sequence
  source 1..27: mol_type = other DNA
tttggaattcatccaatccaaatgcgg

SEQ ID NO: 844 - DNA, 27 bp, synthetic construct
  misc_feature 1..27: note = B2M gRNA target site sequence
  source 1..27: mol_type = other DNA
tttggattggatgaattccaaattctg

SEQ ID NO: 845 - DNA, 27 bp, synthetic construct
  misc_feature 1..27: note = B2M gRNA target site sequence
  source 1..27: mol_type = other DNA
tttttaatattgatatgcttatacact

SEQ ID NO: 846 - DNA, 27 bp, synthetic construct
  misc_feature 1..27: note = B2M gRNA target site sequence
  source 1..27: mol_type = other DNA
ttttaatattgatatgcttatacactt

SEQ ID NO: 847 - DNA, 27 bp, synthetic construct
  misc_feature 1..27: note = B2M gRNA target site sequence
  source 1..27: mol_type = other DNA
tttaatattgatatgcttatacactta

SEQ ID NO: 848 - DNA, 27 bp, synthetic construct
  misc_feature 1..27: note = B2M gRNA target site sequence
  source 1..27: mol_type = other DNA
tttgtgcataaagtgtaagtgtataag

SEQ ID NO: 849 - DNA, 27 bp, synthetic construct
  misc_feature 1..27: note = B2M gRNA target site sequence
  source 1..27: mol_type = other DNA
ttttgtgcataaagtgtaagtgtataa

SEQ ID NO: 850 - DNA, 27 bp, synthetic construct
  misc_feature 1..27: note = B2M gRNA target site sequence
  source 1..27: mol_type = other DNA
tttatgcacaaaatgtagggttataat

SEQ ID NO: 851 - DNA, 27 bp, synthetic construct
  misc_feature 1..27: note = B2M gRNA target site sequence
  source 1..27: mol_type = other DNA
tttataattctactttgagtgctgtct

SEQ ID NO: 852 - DNA, 27 bp, synthetic construct
  misc_feature 1..27: note = B2M gRNA target site sequence
  source 1..27: mol_type = other DNA
tttgagtgctgtctccatgtttgatgt

SEQ ID NO: 853 - DNA, 27 bp, synthetic construct
  misc_feature 1..27: note = B2M gRNA target site sequence
  source 1..27: mol_type = other DNA
tttgatgtatctgagcaggttgctcca

SEQ ID NO: 854 - DNA, 27 bp, synthetic construct
  misc_feature 1..27: note = B2M gRNA target site sequence
  source 1..27: mol_type = other DNA
tttgaactcttcaatctcttgcactca

SEQ ID NO: 855 - DNA, 27 bp, synthetic construct
  misc_feature 1..27: note = B2M gRNA target site sequence
  source 1..27: mol_type = other DNA
tttgagtgcaagagattgaagagttca

SEQ ID NO: 856 - DNA, 27 bp, synthetic construct
  misc_feature 1..27: note = B2M gRNA target site sequence
  source 1..27: mol_type = other DNA
tttacatactctgcttagaatttgggg

SEQ ID NO: 857 - DNA, 27 bp, synthetic construct
  misc_feature 1..27: note = B2M gRNA target site sequence
  source 1..27: mol_type = other DNA
tttcccccaaattctaagcagagtatg

SEQ ID NO: 858 - DNA, 27 bp, synthetic construct
  misc_feature 1..27: note = B2M gRNA target site sequence
  source 1..27: mol_type = other DNA
ttttcccccaaattctaagcagagtat

SEQ ID NO: 859 - DNA, 27 bp, synthetic construct
  misc_feature 1..27: note = B2M gRNA target site sequence
  source 1..27: mol_type = other DNA
tttctaaattttcccccaaattctaag

SEQ ID NO: 860 - DNA, 27 bp, synthetic construct
  misc_feature 1..27: note = B2M gRNA target site sequence
  source 1..27: mol_type = other DNA
tttgggggaaaatttagaaatataatt

SEQ ID NO: 861 - DNA, 27 bp, synthetic construct
  misc_feature 1..27: note = B2M gRNA target site sequence
  source 1..27: mol_type = other DNA
tttagaaatataattgacaggattatt

SEQ ID NO: 862 - DNA, 27 bp, synthetic construct
  misc_feature 1..27: note = B2M gRNA target site sequence
  source 1..27: mol_type = other DNA
tttccaataatcctgtcaattatattt

SEQ ID NO: 863 - DNA, 27 bp, synthetic construct
  misc_feature 1..27: note = B2M gRNA target site sequence
  source 1..27: mol_type = other DNA
tttcattcattataacaaatttccaat

SEQ ID NO: 864 - DNA, 27 bp, synthetic construct
  misc_feature 1..27: note = B2M gRNA target site sequence
  source 1..27: mol_type = other DNA
tttgttataatgaatgaaacattttgt

SEQ ID NO: 865 - DNA, 27 bp, synthetic construct
  misc_feature 1..27: note = B2M gRNA target site sequence
  source 1..27: mol_type = other DNA
ttttgtcatataagattcatatttact

SEQ ID NO: 866 - DNA, 27 bp, synthetic construct
  misc_feature 1..27: note = B2M gRNA target site sequence
  source 1..27: mol_type = other DNA
tttgtcatataagattcatatttactt

SEQ ID NO: 867 - DNA, 27 bp, synthetic construct
  misc_feature 1..27: note = B2M gRNA target site sequence
  source 1..27: mol_type = other DNA
tttatcaaatgtataagaagtaaatat

SEQ ID NO: 868 - DNA, 27 bp, synthetic construct
  misc_feature 1..27: note = B2M gRNA target site sequence
  source 1..27: mol_type = other DNA
tttacttcttatacatttgataaagta

SEQ ID NO: 869 - DNA, 27 bp, synthetic construct
  misc_feature 1..27: note = B2M gRNA target site sequence
  source 1..27: mol_type = other DNA
tttgataaagtaaggcatggttgtggt

SEQ ID NO: 870 - DNA, 27 bp, synthetic construct
  misc_feature 1..27: note = B2M gRNA target site sequence
  source 1..27: mol_type = other DNA
tttaacttgtggaacaaaaataaacca

SEQ ID NO: 871 - DNA, 27 bp, synthetic construct
  misc_feature 1..27: note = B2M gRNA target site sequence
  source 1..27: mol_type = other DNA
tttatttttgttccacaagttaaataa

SEQ ID NO: 872 - DNA, 27 bp, synthetic construct
  misc_feature 1..27: note = B2M gRNA target site sequence
  source 1..27: mol_type = other DNA
tttatttaacttgtggaacaaaaataa

SEQ ID NO: 873 - DNA, 27 bp, synthetic construct
  misc_feature 1..27: note = B2M gRNA target site sequence
  source 1..27: mol_type = other DNA
tttttgttccacaagttaaataaatca

SEQ ID NO: 874 - DNA, 27 bp, synthetic construct
  misc_feature 1..27: note = B2M gRNA target site sequence
  source 1..27: mol_type = other DNA
ttttgttccacaagttaaataaatcat

SEQ ID NO: 875 - DNA, 27 bp, synthetic construct
  misc_feature 1..27: note = B2M gRNA target site sequence
  source 1..27: mol_type = other DNA
tttgttccacaagttaaataaatcata

SEQ ID NO: 876 - DNA, 27 bp, synthetic construct
  misc_feature 1..27: note = B2M gRNA target site sequence
  source 1..27: mol_type = other DNA
tttatgatttatttaacttgtggaaca

SEQ ID NO: 877 - DNA, 27 bp, synthetic construct
  misc_feature 1..27: note = B2M gRNA target site sequence
  source 1..27: mol_type = other DNA
ttttatgatttatttaacttgtggaac

SEQ ID NO: 878 - DNA, 27 bp, synthetic construct
  misc_feature 1..27: note = B2M gRNA target site sequence
  source 1..27: mol_type = other DNA
tttgaaaataaaggggtaatagtggga

SEQ ID NO: 879 - DNA, 27 bp, synthetic construct
  misc_feature 1..27: note = B2M gRNA target site sequence
  source 1..27: mol_type = other DNA
tttccctgtttgaaaataaaggggtaa

SEQ ID NO: 880 - DNA, 27 bp, synthetic construct
  misc_feature 1..27: note = B2M gRNA target site sequence
  source 1..27: mol_type = other DNA
tttattttcaaacagggaaacagtctt

SEQ ID NO: 881 - DNA, 20 bp, synthetic construct
  misc_feature 1..20: note = B2M gRNA target site sequence
  source 1..20: mol_type = other DNA
cctgcgggccttgtcctgat

SEQ ID NO: 882 - DNA, 20 bp, synthetic construct
  misc_feature 1..20: note = B2M gRNA target site sequence
  source 1..20: mol_type = other DNA
cgggccttgtcctgattggc

SEQ ID NO: 883 - DNA, 20 bp, synthetic construct
  misc_feature 1..20: note = B2M gRNA target site sequence
  source 1..20: mol_type = other DNA
gggccttgtcctgattggct

SEQ ID NO: 884 - DNA, 20 bp, synthetic construct
  misc_feature 1..20: note = B2M gRNA target site sequence
  source 1..20: mol_type = other DNA
gctgggcacgcgtttaatat

SEQ ID NO: 885 - DNA, 20 bp, synthetic construct
  misc_feature 1..20: note = B2M gRNA target site sequence
  source 1..20: mol_type = other DNA
gggcacgcgtttaatataag

SEQ ID NO: 886 - DNA, 20 bp, synthetic construct
  misc_feature 1..20: note = B2M gRNA target site sequence
  source 1..20: mol_type = other DNA
gcacgcgtttaatataagtg

SEQ ID NO: 887 - DNA, 20 bp, synthetic construct
  misc_feature 1..20: note = B2M gRNA target site sequence
  source 1..20: mol_type = other DNA
cacgcgtttaatataagtgg

SEQ ID NO: 888 - DNA, 20 bp, synthetic construct
  misc_feature 1..20: note = B2M gRNA target site sequence
  source 1..20: mol_type = other DNA
tataagtggaggcgtcgcgc

SEQ ID NO: 889 - DNA, 20 bp, synthetic construct
  misc_feature 1..20: note = B2M gRNA target site sequence
  source 1..20: mol_type = other DNA
aagtggaggcgtcgcgctgg

SEQ ID NO: 890 - DNA, 20 bp, synthetic construct
  misc_feature 1..20: note = B2M gRNA target site sequence
  source 1..20: mol_type = other DNA
agtggaggcgtcgcgctggc

SEQ ID NO: 891 - DNA, 20 bp, synthetic construct
  misc_feature 1..20: note = B2M gRNA target site sequence
  source 1..20: mol_type = other DNA
cgcgctggcgggcattcctg

SEQ ID NO: 892 - DNA, 20 bp, synthetic construct
  misc_feature 1..20: note = B2M gRNA target site sequence
  source 1..20: mol_type = other DNA
gcgggcattcctgaagctga

SEQ ID NO: 893 - DNA, 20 bp, synthetic construct
  misc_feature 1..20: note = B2M gRNA target site sequence
  source 1..20: mol_type = other DNA
ttcctgaagctgacagcatt

SEQ ID NO: 894 - DNA, 20 bp, synthetic construct
  misc_feature 1..20: note = B2M gRNA target site sequence
  source 1..20: mol_type = other DNA
tcctgaagctgacagcattc

SEQ ID NO: 895 - DNA, 20 bp, synthetic construct
  misc_feature 1..20: note = B2M gRNA target site sequence
  source 1..20: mol_type = other DNA
aagctgacagcattcgggcc

SEQ ID NO: 896 - DNA, 20 bp, synthetic construct
  misc_feature 1..20: note = B2M gRNA target site sequence
  source 1..20: mol_type = other DNA
ggccgagatgtctcgctccg

SEQ ID NO: 897 - DNA, 20 bp, synthetic construct
  misc_feature 1..20: note = B2M gRNA target site sequence
  source 1..20: mol_type = other DNA
gatgtctcgctccgtggcct

SEQ ID NO: 898 - DNA, 20 bp, synthetic construct
  misc_feature 1..20: note = B2M gRNA target site sequence
  source 1..20: mol_type = other DNA
ctcgcgctactctctctttc

SEQ ID NO: 899 - DNA, 20 bp, synthetic construct
  misc_feature 1..20: note = B2M gRNA target site sequence
  source 1..20: mol_type = other DNA
gctactctctctttctggcc

SEQ ID NO: 900 - DNA, 20 bp, synthetic construct
  misc_feature 1..20: note = B2M gRNA target site sequence
  source 1..20: mol_type = other DNA
tactctctctttctggcctg

SEQ ID NO: 901 - DNA, 20 bp, synthetic construct
  misc_feature 1..20: note = B2M gRNA target site sequence
  source 1..20: mol_type = other DNA
actctctctttctggcctgg

SEQ ID NO: 902 - DNA, 20 bp, synthetic construct
  misc_feature 1..20: note = B2M gRNA target site sequence
  source 1..20: mol_type = other DNA
tttctggcctggaggctatc

SEQ ID NO: 903 - DNA, 20 bp, synthetic construct
  misc_feature 1..20: note = B2M gRNA target site sequence
  source 1..20: mol_type = other DNA
gcctggaggctatccagcgt

SEQ ID NO: 904 - DNA, 20 bp, synthetic construct
  misc_feature 1..20: note = B2M gRNA target site sequence
  source 1..20: mol_type = other DNA
tctctcctaccctcccgctc

SEQ ID NO: 905 - DNA, 20 bp, synthetic construct
  misc_feature 1..20: note = B2M gRNA target site sequence
  source 1..20: mol_type = other DNA
ctcccgctctgcaccctctg

SEQ ID NO: 906 - DNA, 20 bp, synthetic construct
  misc_feature 1..20: note = B2M gRNA target site sequence
  source 1..20: mol_type = other DNA
ctccgtgacttcccttctcc

SEQ ID NO: 907 - DNA, 20 bp, synthetic construct
  misc_feature 1..20: note = B2M gRNA target site sequence
  source 1..20: mol_type = other DNA
tcccttctccaagttctcct

SEQ ID NO: 908 - DNA, 20 bp, synthetic construct
  misc_feature 1..20: note = B2M gRNA target site sequence
  source 1..20: mol_type = other DNA
cttctccaagttctccttgg

SEQ ID NO: 909 - DNA, 20 bp, synthetic construct
  misc_feature 1..20: note = B2M gRNA target site sequence
  source 1..20: mol_type = other DNA
ttctccttggtggcccgccg

SEQ ID NO: 910 - DNA, 20 bp, synthetic construct
  misc_feature 1..20: note = B2M gRNA target site sequence
  source 1..20: mol_type = other DNA
tctccttggtggcccgccgt

SEQ ID NO: 911 - DNA, 20 bp, synthetic construct
  misc_feature 1..20: note = B2M gRNA target site sequence
  source 1..20: mol_type = other DNA
ctccttggtggcccgccgtg

SEQ ID NO: 912 - DNA, 20 bp, synthetic construct
  misc_feature 1..20: note = B2M gRNA target site sequence
  source 1..20: mol_type = other DNA
ttggtggcccgccgtggggc

SEQ ID NO: 913 - DNA, 20 bp, synthetic construct
  misc_feature 1..20: note = B2M gRNA target site sequence
  source 1..20: mol_type = other DNA
ggcccgccgtggggctagtc

SEQ ID NO: 914 - DNA, 20 bp, synthetic construct
  misc_feature 1..20: note = B2M gRNA target site sequence
  source 1..20: mol_type = other DNA
gcccgccgtggggctagtcc

SEQ ID NO: 915 - DNA, 20 bp, synthetic construct
  misc_feature 1..20: note = B2M gRNA target site sequence
  source 1..20: mol_type = other DNA
cccgccgtggggctagtcca

SEQ ID NO: 916 - DNA, 20 bp, synthetic construct
  misc_feature 1..20: note = B2M gRNA target site sequence
  source 1..20: mol_type = other DNA
ccgtggggctagtccagggc

SEQ ID NO: 917 - DNA, 20 bp, synthetic construct
  misc_feature 1..20: note = B2M gRNA target site sequence
  source 1..20: mol_type = other DNA
gctagtccagggctggatct

SEQ ID NO: 918 - DNA, 20 bp, synthetic construct
  misc_feature 1..20: note = B2M gRNA target site sequence
  source 1..20: mol_type = other DNA
ctagtccagggctggatctc

SEQ ID NO: 919 - DNA, 20 bp, synthetic construct
  misc_feature 1..20: note = B2M gRNA target site sequence
  source 1..20: mol_type = other DNA
tagtccagggctggatctcg

SEQ ID NO: 920 - DNA, 20 bp, synthetic construct
  misc_feature 1..20: note = B2M gRNA target site sequence
  source 1..20: mol_type = other DNA
tccagggctggatctcgggg

SEQ ID NO: 921 - DNA, 20 bp, synthetic construct
  misc_feature 1..20: note = B2M gRNA target site sequence
  source 1..20: mol_type = other DNA
agggctggatctcggggaag

SEQ ID NO: 922 - DNA, 20 bp, synthetic construct
  misc_feature 1..20: note = B2M gRNA target site sequence
  source 1..20: mol_type = other DNA
gctggatctcggggaagcgg

SEQ ID NO: 923 - DNA, 20 bp, synthetic construct
  misc_feature 1..20: note = B2M gRNA target site sequence
  source 1..20: mol_type = other DNA
ctggatctcggggaagcggc

SEQ ID NO: 924 - DNA, 20 bp, synthetic construct
  misc_feature 1..20: note = B2M gRNA target site sequence
  source 1..20: mol_type = other DNA
tggatctcggggaagcggcg

SEQ ID NO: 925 - DNA, 20 bp, synthetic construct
  misc_feature 1..20: note = B2M gRNA target site sequence
  source 1..20: mol_type = other DNA
atctcggggaagcggcgggg

SEQ ID NO: 926 - DNA, 20 bp, synthetic construct
  misc_feature 1..20: note = B2M gRNA target site sequence
  source 1..20: mol_type = other DNA
ggggaagcggcggggtggcc

SEQ ID NO: 927 - DNA, 20 bp, synthetic construct
  misc_feature 1..20: note = B2M gRNA target site sequence
  source 1..20: mol_type = other DNA
gggaagcggcggggtggcct

SEQ ID NO: 928 - DNA, 20 bp, synthetic construct
  misc_feature 1..20: note = B2M gRNA target site sequence
  source 1..20: mol_type = other DNA
gaagcggcggggtggcctgg

SEQ ID NO: 929 - DNA, 20 bp, synthetic construct
  misc_feature 1..20: note = B2M gRNA target site sequence
  source 1..20: mol_type = other DNA
gcggcggggtggcctgggag

SEQ ID NO: 930 - DNA, 20 bp, synthetic construct
  misc_feature 1..20: note = B2M gRNA target site sequence
  source 1..20: mol_type = other DNA
cggcggggtggcctgggagt

SEQ ID NO: 931 - DNA, 20 bp, synthetic construct
  misc_feature 1..20: note = B2M gRNA target site sequence
  source 1..20: mol_type = other DNA
ggcggggtggcctgggagtg

SEQ ID NO: 932 - DNA, 20 bp, synthetic construct
  misc_feature 1..20: note = B2M gRNA target site sequence
  source 1..20: mol_type = other DNA
ggggtggcctgggagtgggg

SEQ ID NO: 933 - DNA, 20 bp, synthetic construct
  misc_feature 1..20: note = B2M gRNA target site sequence
  source 1..20: mol_type = other DNA
gggtggcctgggagtgggga

SEQ ID NO: 934 - DNA, 20 bp, synthetic construct
  misc_feature 1..20: note = B2M gRNA target site sequence
  source 1..20: mol_type = other DNA
ggtggcctgggagtggggaa

SEQ ID NO: 935 - DNA, 20 bp, synthetic construct
  misc_feature 1..20: note = B2M gRNA target site sequence
  source 1..20: mol_type = other DNA
gtggcctgggagtggggaag

SEQ ID NO: 936 - DNA, 20 bp, synthetic construct
  misc_feature 1..20: note = B2M gRNA target site sequence
  source 1..20: mol_type = other DNA
tggcctgggagtggggaagg

SEQ ID NO: 937 - DNA, 20 bp, synthetic construct
  misc_feature 1..20: note = B2M gRNA target site sequence
  source 1..20: mol_type = other DNA
tggggaagggggtgcgcacc

SEQ ID NO: 938 - DNA, 20 bp, synthetic construct
  misc_feature 1..20: note = B2M gRNA target site sequence
  source 1..20: mol_type = other DNA
ggggaagggggtgcgcaccc

SEQ ID NO: 939 - DNA, 20 bp, synthetic construct
  misc_feature 1..20: note = B2M gRNA target site sequence
  source 1..20: mol_type = other DNA
cgcgcgctacttgccccttt

SEQ ID NO: 940 - DNA, 20 bp, synthetic construct
  misc_feature 1..20: note = B2M gRNA target site sequence
  source 1..20: mol_type = other DNA
gcgctacttgcccctttcgg

SEQ ID NO: 941 - DNA, 20 bp, synthetic construct
  misc_feature 1..20: note = B2M gRNA target site sequence
  source 1..20: mol_type = other DNA
cgctacttgcccctttcggc

SEQ ID NO: 942 - DNA, 20 bp, synthetic construct
  misc_feature 1..20: note = B2M gRNA target site sequence
  source 1..20: mol_type = other DNA
gctacttgcccctttcggcg

SEQ ID NO: 943 - DNA, 20 bp, synthetic construct
  misc_feature 1..20: note = B2M gRNA target site sequence
  source 1..20: mol_type = other DNA
tacttgcccctttcggcggg

SEQ ID NO: 944 - DNA, 20 bp, synthetic construct
  misc_feature 1..20: note = B2M gRNA target site sequence
  source 1..20: mol_type = other DNA
ttgcccctttcggcggggag

SEQ ID NO: 945 - DNA, 20 bp, synthetic construct
  misc_feature 1..20: note = B2M gRNA target site sequence
  source 1..20: mol_type = other DNA
tgcccctttcggcggggagc

SEQ ID NO: 946 - DNA, 20 bp, synthetic construct
  misc_feature 1..20: note = B2M gRNA target site sequence
  source 1..20: mol_type = other DNA
gcccctttcggcggggagca

SEQ ID NO: 947 - DNA, 20 bp, synthetic construct
  misc_feature 1..20: note = B2M gRNA target site sequence
  source 1..20: mol_type = other DNA
cccctttcggcggggagcag

SEQ ID NO: 948 - DNA, 20 bp, synthetic construct
  misc_feature 1..20: note = B2M gRNA target site sequence
  source 1..20: mol_type = other DNA
cctttcggcggggagcaggg

SEQ ID NO: 949 - DNA, 20 bp, synthetic construct
  misc_feature 1..20: note = B2M gRNA target site sequence
  source 1..20: mol_type = other DNA
cggggagcaggggagacctt

SEQ ID NO: 950 - DNA, 20 bp, synthetic construct
  misc_feature 1..20: note = B2M gRNA target site sequence
  source 1..20: mol_type = other DNA
caggggagacctttggccta

SEQ ID NO: 951 - DNA, 20 bp, synthetic construct
  misc_feature 1..20: note = B2M gRNA target site sequence
  source 1..20: mol_type = other DNA
agacctttggcctacggcga

SEQ ID NO: 952 - DNA, 20 bp, synthetic construct
  misc_feature 1..20: note = B2M gRNA target site sequence
  source 1..20: mol_type = other DNA
gacctttggcctacggcgac

SEQ ID NO: 953 - DNA, 20 bp, synthetic construct
  misc_feature 1..20: note = B2M gRNA target site sequence
  source 1..20: mol_type = other DNA
cctttggcctacggcgacgg

SEQ ID NO: 954 - DNA, 20 bp, synthetic construct
  misc_feature 1..20: note = B2M gRNA target site sequence
  source 1..20: mol_type = other DNA
ctttggcctacggcgacggg

SEQ ID NO: 955 - DNA, 20 bp, synthetic construct
  misc_feature 1..20: note = B2M gRNA target site sequence
  source 1..20: mol_type = other DNA
tttggcctacggcgacggga

SEQ ID NO: 956 - DNA, 20 bp, synthetic construct
  misc_feature 1..20: note = B2M gRNA target site sequence
  source 1..20: mol_type = other DNA
gcctacggcgacgggagggt

SEQ ID NO: 957 - DNA, 20 bp, synthetic construct
  misc_feature 1..20: note = B2M gRNA target site sequence
  source 1..20: mol_type = other DNA
cctacggcgacgggagggtc

SEQ ID NO: 958 - DNA, 20 bp, synthetic construct
  misc_feature 1..20: note = B2M gRNA target site sequence
  source 1..20: mol_type = other DNA
gcgacgggagggtcgggaca

SEQ ID NO: 959 - DNA, 20 bp, synthetic construct
  misc_feature 1..20: note = B2M gRNA target site sequence
  source 1..20: mol_type = other DNA
gggagggtcgggacaaagtt

SEQ ID NO: 960 - DNA, 20 bp, synthetic construct
  misc_feature 1..20: note = B2M gRNA target site sequence
  source 1..20: mol_type = other DNA
ggagggtcgggacaaagttt

SEQ ID NO: 961 - DNA, 20 bp, synthetic construct
  misc_feature 1..20: note = B2M gRNA target site sequence
  source 1..20: mol_type = other DNA
gagggtcgggacaaagttta

SEQ ID NO: 962 - DNA, 20 bp, synthetic construct
  misc_feature 1..20: note = B2M gRNA target site sequence
  source 1..20: mol_type = other DNA
acaaagtttagggcgtcgat

SEQ ID NO: 963 - DNA, 20 bp, synthetic construct
  misc_feature 1..20: note = B2M gRNA target site sequence
  source 1..20: mol_type = other DNA
tttagggcgtcgataagcgt

SEQ ID NO: 964 - DNA, 20 bp, synthetic construct
  misc_feature 1..20: note = B2M gRNA target site sequence
  source 1..20: mol_type = other DNA
tagggcgtcgataagcgtca

SEQ ID NO: 965 - DNA, 20 bp, synthetic construct
  misc_feature 1..20: note = B2M gRNA target site sequence
  source 1..20: mol_type = other DNA
tcgataagcgtcagagcgcc

SEQ ID NO: 966 - DNA, 20 bp, synthetic construct
  misc_feature 1..20: note = B2M gRNA target site sequence
  source 1..20: mol_type = other DNA
cgataagcgtcagagcgccg

SEQ ID NO: 967 - DNA, 20 bp, synthetic construct
  misc_feature 1..20: note = B2M gRNA target site sequence
  source 1..20: mol_type = other DNA
aagcgtcagagcgccgaggt

SEQ ID NO: 968 - DNA, 20 bp, synthetic construct
  misc_feature 1..20: note = B2M gRNA target site sequence
  source 1..20: mol_type = other DNA
agcgtcagagcgccgaggtt

SEQ ID NO: 969 - DNA, 20 bp, synthetic construct
  misc_feature 1..20: note = B2M gRNA target site sequence
  source 1..20: mol_type = other DNA
gcgtcagagcgccgaggttg

SEQ ID NO: 970 - DNA, 20 bp, synthetic construct
  misc_feature 1..20: note = B2M gRNA target site sequence
  source 1..20: mol_type = other DNA
cgtcagagcgccgaggttgg

SEQ ID NO: 971 - DNA, 20 bp, synthetic construct
  misc_feature 1..20: note = B2M gRNA target site sequence
  source 1..20: mol_type = other DNA
tcagagcgccgaggttgggg

SEQ ID NO: 972 - DNA, 20 bp, synthetic construct
  misc_feature 1..20: note = B2M gRNA target site sequence
  source 1..20: mol_type = other DNA
cagagcgccgaggttggggg

SEQ ID NO: 973 - DNA, 20 bp, synthetic construct
  misc_feature 1..20: note = B2M gRNA target site sequence
  source 1..20: mol_type = other DNA
agagcgccgaggttggggga

SEQ ID NO: 974 - DNA, 20 bp, synthetic construct
  misc_feature 1..20: note = B2M gRNA target site sequence
  source 1..20: mol_type = other DNA
gtttctcttccgctctttcg

SEQ ID NO: 975 - DNA, 20 bp, synthetic construct
  misc_feature 1..20: note = B2M gRNA target site sequence
  source 1..20: mol_type = other DNA
tttctcttccgctctttcgc

SEQ ID NO: 976 - DNA, 20 bp, synthetic construct
  misc_feature 1..20: note = B2M gRNA target site sequence
  source 1..20: mol_type = other DNA
ttctcttccgctctttcgcg

SEQ ID NO: 977 - DNA, 20 bp, synthetic construct
  misc_feature 1..20: note = B2M gRNA target site sequence
  source 1..20: mol_type = other DNA
ccgctctttcgcggggcctc

SEQ ID NO: 978 - DNA, 20 bp, synthetic construct
  misc_feature 1..20: note = B2M gRNA target site sequence
  source 1..20: mol_type = other DNA
cgcggggcctctggctcccc

SEQ ID NO: 979 - DNA, 20 bp, synthetic construct
  misc_feature 1..20: note = B2M gRNA target site sequence
  source 1..20: mol_type = other DNA
ggcctctggctcccccagcg

SEQ ID NO: 980 - DNA, 20 bp, synthetic construct
  misc_feature 1..20: note = B2M gRNA target site sequence
  source 1..20: mol_type = other DNA
tctggctcccccagcgcagc

SEQ ID NO: 981 - DNA, 20 bp, synthetic construct
  misc_feature 1..20: note = B2M gRNA target site sequence
  source 1..20: mol_type = other DNA
tggctcccccagcgcagctg

SEQ ID NO: 982 - DNA, 20 bp, synthetic construct
  misc_feature 1..20: note = B2M gRNA target site sequence
  source 1..20: mol_type = other DNA
ctcccccagcgcagctggag

SEQ ID NO: 983 - DNA, 20 bp, synthetic construct
  misc_feature 1..20: note = B2M gRNA target site sequence
  source 1..20: mol_type = other DNA
tcccccagcgcagctggagt

SEQ ID NO: 984 - DNA, 20 bp, synthetic construct
  misc_feature 1..20: note = B2M gRNA target site sequence
  source 1..20: mol_type = other DNA
cccccagcgcagctggagtg

SEQ ID NO: 985 - DNA, 20 bp, synthetic construct
  misc_feature 1..20: note = B2M gRNA target site sequence
  source 1..20: mol_type = other DNA
ccccagcgcagctggagtgg

SEQ ID NO: 986 - DNA, 20 bp, synthetic construct
  misc_feature 1..20: note = B2M gRNA target site sequence
  source 1..20: mol_type = other DNA
agcgcagctggagtggggga

SEQ ID NO: 987 - DNA, 20 bp, synthetic construct
  misc_feature 1..20: note = B2M gRNA target site sequence
  source 1..20: mol_type = other DNA
gcgcagctggagtgggggac

SEQ ID NO: 988 - DNA, 20 bp, synthetic construct
  misc_feature 1..20: note = B2M gRNA target site sequence
  source 1..20: mol_type = other DNA
cagctggagtgggggacggg

SEQ ID NO: 989 - DNA, 20 bp, synthetic construct
  misc_feature 1..20: note = B2M gRNA target site sequence
  source 1..20: mol_type = other DNA
agctggagtgggggacgggt

SEQ ID NO: 990 - DNA, 20 bp, synthetic construct
  misc_feature 1..20: note = B2M gRNA target site sequence
  source 1..20: mol_type = other DNA
ggacgggtaggctcgtccca

SEQ ID NO: 991 - DNA, 20 bp, synthetic construct
  misc_feature 1..20: note = B2M gRNA target site sequence
  source 1..20: mol_type = other DNA
gacgggtaggctcgtcccaa

SEQ ID NO: 992 - DNA, 20 bp, synthetic construct
  misc_feature 1..20: note = B2M gRNA target site sequence
  source 1..20: mol_type = other DNA
gtaggctcgtcccaaaggcg

SEQ ID NO: 993 - DNA, 20 bp, synthetic construct
  misc_feature 1..20: note = B2M gRNA target site sequence
  source 1..20: mol_type = other DNA
cgtcccaaaggcgcggcgct

SEQ ID NO: 994 - DNA, 20 bp, synthetic construct
  misc_feature 1..20: note = B2M gRNA target site sequence
  source 1..20: mol_type = other DNA
gtcccaaaggcgcggcgctg

SEQ ID NO: 995 - DNA, 20 bp, synthetic construct
  misc_feature 1..20: note = B2M gRNA target site sequence
  source 1..20: mol_type = other DNA
cgctgaggtttgtgaacgcg

SEQ ID NO: 996 - DNA, 20 bp, synthetic construct
  misc_feature 1..20: note = B2M gRNA target site sequence
  source 1..20: mol_type = other DNA
ctgaggtttgtgaacgcgtg

SEQ ID NO: 997 - DNA, 20 bp, synthetic construct
  misc_feature 1..20: note = B2M gRNA target site sequence
  source 1..20: mol_type = other DNA
tgaggtttgtgaacgcgtgg

SEQ ID NO: 998 - DNA, 20 bp, synthetic construct
  misc_feature 1..20: note = B2M gRNA target site sequence
  source 1..20: mol_type = other DNA
gaggtttgtgaacgcgtgga

SEQ ID NO: 999 - DNA, 20 bp, synthetic construct
  misc_feature 1..20: note = B2M gRNA target site sequence
  source 1..20: mol_type = other DNA
aggtttgtgaacgcgtggag

SEQ ID NO: 1000 - DNA, 20 bp, synthetic construct
  misc_feature 1..20: note = B2M gRNA target site sequence
  source 1..20: mol_type = other DNA
tgaacgcgtggaggggcgct

SEQ ID NO: 1001 - DNA, 20 bp, synthetic construct
  misc_feature 1..20: note = B2M gRNA target site sequence
  source 1..20: mol_type = other DNA
gaacgcgtggaggggcgctt

SEQ ID NO: 1002 - DNA, 20 bp, synthetic construct
  misc_feature 1..20: note = B2M gRNA target site sequence
  source 1..20: mol_type = other DNA
aacgcgtggaggggcgcttg

SEQ ID NO: 1003 - DNA, 20 bp, synthetic construct
  misc_feature 1..20: note = B2M gRNA target site sequence
  source 1..20: mol_type = other DNA
gtggaggggcgcttggggtc

SEQ ID NO: 1004 - DNA, 20 bp, synthetic construct
  misc_feature 1..20: note = B2M gRNA target site sequence
  source 1..20: mol_type = other DNA
tggaggggcgcttggggtct

SEQ ID NO: 1005 - DNA, 20 bp, synthetic construct
  misc_feature 1..20: note = B2M gRNA target site sequence
  source 1..20: mol_type = other DNA
ggaggggcgcttggggtctg

SEQ ID NO: 1006 - DNA, 20 bp, synthetic construct
  misc_feature 1..20: note = B2M gRNA target site sequence
  source 1..20: mol_type = other DNA
gaggggcgcttggggtctgg

SEQ ID NO: 1007 - DNA, 20 bp, synthetic construct
  misc_feature 1..20: note = B2M gRNA target site sequence
  source 1..20: mol_type = other DNA
ggggcgcttggggtctgggg

SEQ ID NO: 1008 - DNA, 20 bp, synthetic construct
  misc_feature 1..20: note = B2M gRNA target site sequence
  source 1..20: mol_type = other DNA
gggcgcttggggtctggggg

SEQ ID NO: 1009 - DNA, 20 bp, synthetic construct
  misc_feature 1..20: note = B2M gRNA target site sequence
  source 1..20: mol_type = other DNA
ggtctgggggaggcgtcgcc

SEQ ID NO: 1010 - DNA, 20 bp, synthetic construct
  misc_feature 1..20: note = B2M gRNA target site sequence
  source 1..20: mol_type = other DNA
gtctgggggaggcgtcgccc

SEQ ID NO: 1011 - DNA, 20 bp, synthetic construct
  misc_feature 1..20: note = B2M gRNA target site sequence
  source 1..20: mol_type = other DNA
gggggaggcgtcgcccgggt

SEQ ID NO: 1012 - DNA, 20 bp, synthetic construct
  misc_feature 1..20: note = B2M gRNA target site sequence
  source 1..20: mol_type = other DNA
ccgggtaagcctgtctgctg

SEQ ID NO: 1013 - DNA, 20 bp, synthetic construct
  misc_feature 1..20: note = B2M gRNA target site sequence
  source 1..20: mol_type = other DNA
tgctgcggctctgcttccct

SEQ ID NO: 1014 - DNA, 20 bp, synthetic construct
  misc_feature 1..20: note = B2M gRNA target site sequence
  source 1..20: mol_type = other DNA
cggctctgcttcccttagac

SEQ ID NO: 1015 - DNA, 20 bp, synthetic construct
  misc_feature 1..20: note = B2M gRNA target site sequence
  source 1..20: mol_type = other DNA
gctctgcttcccttagactg

SEQ ID NO: 1016 - DNA, 20 bp, synthetic construct
  misc_feature 1..20: note = B2M gRNA target site sequence
  source 1..20: mol_type = other DNA
tctgcttcccttagactgga

SEQ ID NO: 1017 - DNA, 20 bp, synthetic construct
  misc_feature 1..20: note = B2M gRNA target site sequence
  source 1..20: mol_type = other DNA
tcccttagactggagagctg

SEQ ID NO: 1018 - DNA, 20 bp, synthetic construct
  misc_feature 1..20: note = B2M gRNA target site sequence
  source 1..20: mol_type = other DNA
ggagagctgtggacttcgtc

SEQ ID NO: 1019 - DNA, 20 bp, synthetic construct
  misc_feature 1..20: note = B2M gRNA target site sequence
  source 1..20: mol_type = other DNA
gagagctgtggacttcgtct

SEQ ID NO: 1020 - DNA, 20 bp, synthetic construct
  misc_feature 1..20: note = B2M gRNA target site sequence
  source 1..20: mol_type = other DNA
acttcgtctaggcgcccgct

SEQ ID NO: 1021 - DNA, 20 bp, synthetic construct
  misc_feature 1..20: note = B2M gRNA target site sequence
  source 1..20: mol_type = other DNA
cccgctaagttcgcatgtcc

SEQ ID NO: 1022 - DNA, 20 bp, synthetic construct
  misc_feature 1..20: note = B2M gRNA target site sequence
  source 1..20: mol_type = other DNA
ttcgcatgtcctagcacctc

SEQ ID NO: 1023 - DNA, 20 bp, synthetic construct
  misc_feature 1..20: note = B2M gRNA target site sequence
  source 1..20: mol_type = other DNA
tcgcatgtcctagcacctct

SEQ ID NO: 1024 - DNA, 20 bp, synthetic construct
  misc_feature 1..20: note = B2M gRNA target site sequence
  source 1..20: mol_type = other DNA
ctagcacctctgggtctatg

SEQ ID NO: 1025 - DNA, 20 bp, synthetic construct
  misc_feature 1..20: note = B2M gRNA target site sequence
  source 1..20: mol_type = other DNA
tagcacctctgggtctatgt

SEQ ID NO: 1026 - DNA, 20 bp, synthetic construct
  misc_feature 1..20: note = B2M gRNA target site sequence
  source 1..20: mol_type = other DNA
agcacctctgggtctatgtg

SEQ ID NO: 1027 - DNA, 20 bp, synthetic construct
  misc_feature 1..20: note = B2M gRNA target site sequence
  source 1..20: mol_type = other DNA
gtctatgtggggccacaccg

SEQ ID NO: 1028 - DNA, 20 bp, synthetic construct
  misc_feature 1..20: note = B2M gRNA target site sequence
  source 1..20: mol_type = other DNA
tctatgtggggccacaccgt

SEQ ID NO: 1029 - DNA, 20 bp, synthetic construct
  misc_feature 1..20: note = B2M gRNA target site sequence
  source 1..20: mol_type = other DNA
ctatgtggggccacaccgtg

SEQ ID NO: 1030 - DNA, 20 bp, synthetic construct
  misc_feature 1..20: note = B2M gRNA target site sequence
  source 1..20: mol_type = other DNA
atgtggggccacaccgtggg

SEQ ID NO: 1031 - DNA, 20 bp, synthetic construct
  misc_feature 1..20: note = B2M gRNA target site sequence
  source 1..20: mol_type = other DNA
tgtggggccacaccgtgggg

SEQ ID NO: 1032 - DNA, 20 bp, synthetic construct
  misc_feature 1..20: note = B2M gRNA target site sequence
  source 1..20: mol_type = other DNA
gccacaccgtggggaggaaa

SEQ ID NO: 1033 - DNA, 20 bp, synthetic construct
  misc_feature 1..20: note = B2M gRNA target site sequence
  source 1..20: mol_type = other DNA
gaaacagcacgcgacgtttg

SEQ ID NO: 1034 - DNA, 20 bp, synthetic construct
  misc_feature 1..20: note = B2M gRNA target site sequence
  source 1..20: mol_type = other DNA
cgcgacgtttgtagaatgct

SEQ ID NO: 1035 - DNA, 20 bp, synthetic construct
  misc_feature 1..20: note = B2M gRNA target site sequence
  source 1..20: mol_type = other DNA
gaatgcttggctgtgataca

SEQ ID NO: 1036 - DNA, 20 bp, synthetic construct
  misc_feature 1..20: note = B2M gRNA target site sequence
  source 1..20: mol_type = other DNA
tgcttggctgtgatacaaag

SEQ ID NO: 1037 - DNA, 20 bp, synthetic construct
  misc_feature 1..20: note = B2M gRNA target site sequence
  source 1..20: mol_type = other DNA
tgtcacttttaaaaaattat

SEQ ID NO: 1038 - DNA, 20 bp, synthetic construct
  misc_feature 1..20: note = B2M gRNA target site sequence
  source 1..20: mol_type = other DNA
ttgacatctttctgtgtgcc

SEQ ID NO: 1039 - DNA, 20 bp, synthetic construct
  misc_feature 1..20: note = B2M gRNA target site sequence
  source 1..20: mol_type = other DNA
tgacatctttctgtgtgcca

SEQ ID NO: 1040 - DNA, 20 bp, synthetic construct
  misc_feature 1..20: note = B2M gRNA target site sequence
  source 1..20: mol_type = other DNA
gcgtcatttaattttgaaaa

SEQ ID NO: 1041 - DNA, 20 bp, synthetic construct
  misc_feature 1..20: note = B2M gRNA target site sequence
  source 1..20: mol_type = other DNA
aaaacagttatcttccgcca

SEQ ID NO: 1042 - DNA, 20 bp, synthetic construct
  misc_feature 1..20: note = B2M gRNA target site sequence
  source 1..20: mol_type = other DNA
tccgccatagataactacta

SEQ ID NO: 1043 - DNA, 20 bp, synthetic construct
  misc_feature 1..20: note = B2M gRNA target site sequence
  source 1..20: mol_type = other DNA
tggttatcttctgcctctca

SEQ ID NO: 1044 - DNA, 20 bp, synthetic construct
  misc_feature 1..20: note = B2M gRNA target site sequence
  source 1..20: mol_type = other DNA
tcttctgcctctcacagatg

SEQ ID NO: 1045 - DNA, 20 bp, synthetic construct
  misc_feature 1..20: note = B2M gRNA target site sequence
  source 1..20: mol_type = other DNA
ctctcacagatgaagaaact

SEQ ID NO: 1046 - DNA, 20 bp, synthetic construct
  misc_feature 1..20: note = B2M gRNA target site sequence
  source 1..20: mol_type = other DNA
tctcacagatgaagaaacta

SEQ ID NO: 1047 - DNA, 20 bp, synthetic construct
  misc_feature 1..20: note = B2M gRNA target site sequence
  source 1..20: mol_type = other DNA
gatgaagaaactaaggcacc

SEQ ID NO: 1048 - DNA, 20 bp, synthetic construct
  misc_feature 1..20: note = B2M gRNA target site sequence
  source 1..20: mol_type = other DNA
aactaaggcaccgagatttt

SEQ ID NO: 1049 - DNA, 20 bp, synthetic construct
  misc_feature 1..20: note = B2M gRNA target site sequence
  source 1..20: mol_type = other DNA
ttttaagaaacttaattaca

SEQ ID NO: 1050 - DNA, 20 bp, synthetic construct
  misc_feature 1..20: note = B2M gRNA target site sequence
  source 1..20: mol_type = other DNA
tttaagaaacttaattacac

SEQ ID NO: 1051 - DNA, 20 bp, synthetic construct
  misc_feature 1..20: note = B2M gRNA target site sequence
  source 1..20: mol_type = other DNA
ttaagaaacttaattacaca

SEQ ID NO: 1052 - DNA, 20 bp, synthetic construct
  misc_feature 1..20: note = B2M gRNA target site sequence
  source 1..20: mol_type = other DNA
taagaaacttaattacacag

SEQ ID NO: 1053 - DNA, 20 bp, synthetic construct
  misc_feature 1..20: note = B2M gRNA target site sequence
  source 1..20: mol_type = other DNA
ttaattacacaggggataaa

SEQ ID NO: 1054 - DNA, 20 bp, synthetic construct
  misc_feature 1..20: note = B2M gRNA target site sequence
  source 1..20: mol_type = other DNA
attacacaggggataaatgg

SEQ ID NO: 1055 - DNA, 20 bp, synthetic construct
  misc_feature 1..20: note = B2M gRNA target site sequence
  source 1..20: mol_type = other DNA
ggggataaatggcagcaatc

SEQ ID NO: 1056 - DNA, 20 bp, synthetic construct
  misc_feature 1..20: note = B2M gRNA target site sequence
  source 1..20: mol_type = other DNA
aatggcagcaatcgagattg

SEQ ID NO: 1057 - DNA, 20 bp, synthetic construct
  misc_feature 1..20: note = B2M gRNA target site sequence
  source 1..20: mol_type = other DNA
cagcaatcgagattgaagtc

SEQ ID NO: 1058 - DNA, 20 bp, synthetic construct
  misc_feature 1..20: note = B2M gRNA target site sequence
  source 1..20: mol_type = other DNA
agattgaagtcaagcctaac

SEQ ID NO: 1059 - DNA, 20 bp, synthetic construct
  misc_feature 1..20: note = B2M gRNA target site sequence
  source 1..20: mol_type = other DNA
gattgaagtcaagcctaacc

SEQ ID NO: 1060 - DNA, 20 bp, synthetic construct
  misc_feature 1..20: note = B2M gRNA target site sequence
  source 1..20: mol_type = other DNA
attgaagtcaagcctaacca

SEQ ID NO: 1061 - DNA, 20 bp, synthetic construct
  misc_feature 1..20: note = B2M gRNA target site sequence
  source 1..20: mol_type = other DNA
aagcctaaccagggcttttg

SEQ ID NO: 1062 - DNA, 20 bp, synthetic construct
  misc_feature 1..20: note = B2M gRNA target site sequence
  source 1..20: mol_type = other DNA
agcctaaccagggcttttgc

SEQ ID NO: 1063 - DNA, 20 bp, synthetic construct
  misc_feature 1..20: note = B2M gRNA target site sequence
  source 1..20: mol_type = other DNA
cctaaccagggcttttgcgg

SEQ ID NO: 1064 - DNA, 20 bp, synthetic construct
  misc_feature 1..20: note = B2M gRNA target site sequence
  source 1..20: mol_type = other DNA
ttgcgggagcgcatgccttt

SEQ ID NO: 1065 - DNA, 20 bp, synthetic construct
  misc_feature 1..20: note = B2M gRNA target site sequence
  source 1..20: mol_type = other DNA
taattcgtgcattttttttt

SEQ ID NO: 1066 - DNA, 20 bp, synthetic construct
  misc_feature 1..20: note = B2M gRNA target site sequence
  source 1..20: mol_type = other DNA
aaaacgcctgccttctgcgt

SEQ ID NO: 1067 - DNA, 20 bp, synthetic construct
  misc_feature 1..20: note = B2M gRNA target site sequence
  source 1..20: mol_type = other DNA
gccttctgcgtgagattctc

SEQ ID NO: 1068 - DNA, 20 bp, synthetic construct
  misc_feature 1..20: note = B2M gRNA target site sequence
  source 1..20: mol_type = other DNA
cttctgcgtgagattctcca

SEQ ID NO: 1069 - DNA, 20 bp, synthetic construct
  misc_feature 1..20: note = B2M gRNA target site sequence
  source 1..20: mol_type = other DNA
tgagattctccagagcaaac

SEQ ID NO: 1070 - DNA, 20 bp, synthetic construct
  misc_feature 1..20: note = B2M gRNA target site sequence
  source 1..20: mol_type = other DNA
gagattctccagagcaaact

SEQ ID NO: 1071 - DNA, 20 bp, synthetic construct
  misc_feature 1..20: note = B2M gRNA target site sequence
  source 1..20: mol_type = other DNA
attctccagagcaaactggg

SEQ ID NO: 1072 - DNA, 20 bp, synthetic construct
  misc_feature 1..20: note = B2M gRNA target site sequence
  source 1..20: mol_type = other DNA
ccagagcaaactgggcggca

SEQ ID NO: 1073 - DNA, 20 bp, synthetic construct
  misc_feature 1..20: note = B2M gRNA target site sequence
  source 1..20: mol_type = other DNA
cagagcaaactgggcggcat

SEQ ID NO: 1074 - DNA, 20 bp, synthetic construct
  misc_feature 1..20: note = B2M gRNA target site sequence
  source 1..20: mol_type = other DNA
actgggcggcatgggccctg

SEQ ID NO: 1075 - DNA, 20 bp, synthetic construct
  misc_feature 1..20: note = B2M gRNA target site sequence
  source 1..20: mol_type = other DNA
ggccctgtggtcttttcgta

SEQ ID NO: 1076 - DNA, 20 bp, synthetic construct
  misc_feature 1..20: note = B2M gRNA target site sequence
  source 1..20: mol_type = other DNA
ccctgtggtcttttcgtaca

SEQ ID NO: 1077 - DNA, 20 bp, synthetic construct
  misc_feature 1..20: note = B2M gRNA target site sequence
  source 1..20: mol_type = other DNA
cctgtggtcttttcgtacag

SEQ ID NO: 1078 - DNA, 20 bp, synthetic construct
  misc_feature 1..20: note = B2M gRNA target site sequence
  source 1..20: mol_type = other DNA
ctgtggtcttttcgtacaga

SEQ ID NO: 1079 - DNA, 20 bp, synthetic construct
  misc_feature 1..20: note = B2M gRNA target site sequence
  source 1..20: mol_type = other DNA
cgtacagagggcttcctctt

SEQ ID NO: 1080 - DNA, 20 bp, synthetic construct
  misc_feature 1..20: note = B2M gRNA target site sequence
  source 1..20: mol_type = other DNA
ttcctctttggctctttgcc

SEQ ID NO: 1081 - DNA, 20 bp, synthetic construct
  misc_feature 1..20: note = B2M gRNA target site sequence
  source 1..20: mol_type = other DNA
ctctttgcctggttgtttcc

SEQ ID NO: 1082 - DNA, 20 bp, synthetic construct
  misc_feature 1..20: note = B2M gRNA target site sequence
  source 1..20: mol_type = other DNA
tgtactgtgcctcttacttt

SEQ ID NO: 1083 - DNA, 20 bp, synthetic construct
  misc_feature 1..20: note = B2M gRNA target site sequence
  source 1..20: mol_type = other DNA
actttcggttttgaaaacat

SEQ ID NO: 1084 - DNA, 20 bp, synthetic construct
  misc_feature 1..20: note = B2M gRNA target site sequence
  source 1..20: mol_type = other DNA
ctttcggttttgaaaacatg

SEQ ID NO: 1085 - DNA, 20 bp, synthetic construct
  misc_feature 1..20: note = B2M gRNA target site sequence
  source 1..20: mol_type = other DNA
tttcggttttgaaaacatga

SEQ ID NO: 1086 - DNA, 20 bp, synthetic construct
  misc_feature 1..20: note = B2M gRNA target site sequence
  source 1..20: mol_type = other DNA
ttcggttttgaaaacatgag

SEQ ID NO: 1087 - DNA, 20 bp, synthetic construct
  misc_feature 1..20: note = B2M gRNA target site sequence
  source 1..20: mol_type = other DNA
tcggttttgaaaacatgagg

SEQ ID NO: 1088 - DNA, 20 bp, synthetic construct
  misc_feature 1..20: note = B2M gRNA target site sequence
  source 1..20: mol_type = other DNA
ttttgaaaacatgagggggt

SEQ ID NO: 1089 - DNA, 20 bp, synthetic construct
  misc_feature 1..20: note = B2M gRNA target site sequence
  source 1..20: mol_type = other DNA
tttgaaaacatgagggggtt

SEQ ID NO: 1090 - DNA, 20 bp, synthetic construct
  misc_feature 1..20: note = B2M gRNA target site sequence
  source 1..20: mol_type = other DNA
aaacatgagggggttgggcg

SEQ ID NO: 1091 - DNA, 20 bp, synthetic construct
  misc_feature 1..20: note = B2M gRNA target site sequence
  source 1..20: mol_type = other DNA
catgagggggttgggcgtgg

SEQ ID NO: 1092 - DNA, 20 bp, synthetic construct
  misc_feature 1..20: note = B2M gRNA target site sequence
  source 1..20: mol_type = other DNA
gtagcttacgcctgtaatcc

SEQ ID NO: 1093 - DNA, 20 bp, synthetic construct
  misc_feature 1..20: note = B2M gRNA target site sequence
  source 1..20: mol_type = other DNA
acgcctgtaatcccagcact

SEQ ID NO: 1094 - DNA, 20 bp, synthetic construct
  misc_feature 1..20: note = B2M gRNA target site sequence
  source 1..20: mol_type = other DNA
cgcctgtaatcccagcactt

SEQ ID NO: 1095 - DNA, 20 bp, synthetic construct
  misc_feature 1..20: note = B2M gRNA target site sequence
  source 1..20: mol_type = other DNA
gcctgtaatcccagcactta

SEQ ID NO: 1096 - DNA, 20 bp, synthetic construct
  misc_feature 1..20: note = B2M gRNA target site sequence
  source 1..20: mol_type = other DNA
ctgtaatcccagcacttagg

SEQ ID NO: 1097 - DNA, 20 bp, synthetic construct
  misc_feature 1..20: note = B2M gRNA target site sequence
  source 1..20: mol_type = other DNA
tgtaatcccagcacttaggg

SEQ ID NO: 1098 - DNA, 20 bp, synthetic construct
  misc_feature 1..20: note = B2M gRNA target site sequence
  source 1..20: mol_type = other DNA
tcccagcacttagggaggcc

SEQ ID NO: 1099 - DNA, 20 bp, synthetic construct
  misc_feature 1..20: note = B2M gRNA target site sequence
  source 1..20: mol_type = other DNA
cccagcacttagggaggccg

SEQ ID NO: 1100 - DNA, 20 bp, synthetic construct
  misc_feature 1..20: note = B2M gRNA target site sequence
  source 1..20: mol_type = other DNA
agcacttagggaggccgagg

SEQ ID NO: 1101 - DNA, 20 bp, synthetic construct
  misc_feature 1..20: note = B2M gRNA target site sequence
  source 1..20: mol_type = other DNA
gcacttagggaggccgaggc

SEQ ID NO: 1102 - DNA, 20 bp, synthetic construct
  misc_feature 1..20: note = B2M gRNA target site sequence
  source 1..20: mol_type = other DNA
acttagggaggccgaggcgg

SEQ ID NO: 1103 - DNA, 20 bp, synthetic construct
  misc_feature 1..20: note = B2M gRNA target site sequence
  source 1..20: mol_type = other DNA
cttagggaggccgaggcggg

SEQ ID NO: 1104 - DNA, 20 bp, synthetic construct
  misc_feature 1..20: note = B2M gRNA target site sequence
  source 1..20: mol_type = other DNA
gggaggccgaggcgggagga

SEQ ID NO: 1105 - DNA, 20 bp, synthetic construct
  misc_feature 1..20: note = B2M gRNA target site sequence
  source 1..20: mol_type = other DNA
ccgaggcgggaggatggctt

SEQ ID NO: 1106 - DNA, 20 bp, synthetic construct
  misc_feature 1..20: note = B2M gRNA target site sequence
  source 1..20: mol_type = other DNA
cgaggcgggaggatggcttg

SEQ ID NO: 1107 - DNA, 20 bp, synthetic construct
  misc_feature 1..20: note = B2M gRNA target site sequence
  source 1..20: mol_type = other DNA
ggaggatggcttgaggtccg

SEQ ID NO: 1108 - DNA, 20 bp, synthetic construct
  misc_feature 1..20: note = B2M gRNA target site sequence
  source 1..20: mol_type = other DNA
atggcttgaggtccgtagtt

SEQ ID NO: 1109 - DNA, 20 bp, synthetic construct
  misc_feature 1..20: note = B2M gRNA target site sequence
  source 1..20: mol_type = other DNA
ttgaggtccgtagttgagac

SEQ ID NO: 1110 - DNA, 20 bp, synthetic construct
  misc_feature 1..20: note = B2M gRNA target site sequence
  source 1..20: mol_type = other DNA
gtccgtagttgagaccagcc

SEQ ID NO: 1111 - DNA, 20 bp, synthetic construct
  misc_feature 1..20: note = B2M gRNA target site sequence
  source 1..20: mol_type = other DNA
tgagaccagcctggccaaca

SEQ ID NO: 1112 - DNA, 20 bp, synthetic construct
  misc_feature 1..20: note = B2M gRNA target site sequence
  source 1..20: mol_type = other DNA
ccagcctggccaacatggtg

SEQ ID NO: 1113 - DNA, 20 bp, synthetic construct
  misc_feature 1..20: note = B2M gRNA target site sequence
  source 1..20: mol_type = other DNA
ctggccaacatggtgaagcc

SEQ ID NO: 1114 - DNA, 20 bp, synthetic construct
  misc_feature 1..20: note = B2M gRNA target site sequence
  source 1..20: mol_type = other DNA
caaaaaataataacaaaaat

SEQ ID NO: 1115 - DNA, 20 bp, synthetic construct
  misc_feature 1..20: note = B2M gRNA target site sequence
  source 1..20: mol_type = other DNA
aaataataacaaaaattagc

SEQ ID NO: 1116 - DNA, 20 bp, synthetic construct
  misc_feature 1..20: note = B2M gRNA target site sequence
  source 1..20: mol_type = other DNA
aataataacaaaaattagcc

SEQ ID NO: 1117 - DNA, 20 bp, synthetic construct
  misc_feature 1..20: note = B2M gRNA target site sequence
  source 1..20: mol_type = other DNA
taacaaaaattagccgggtg

SEQ ID NO: 1118 - DNA, 20 bp, synthetic construct
  misc_feature 1..20: note = B2M gRNA target site sequence
  source 1..20: mol_type = other DNA
caaaaattagccgggtgtgg

SEQ ID NO: 1119 - DNA, 20 bp, synthetic construct
  misc_feature 1..20: note = B2M gRNA target site sequence
  source 1..20: mol_type = other DNA
ggtgtggtggctcgtgcctg

SEQ ID NO: 1120 - DNA, 20 bp, synthetic construct
  misc_feature 1..20: note = B2M gRNA target site sequence
  source 1..20: mol_type = other DNA
gtggctcgtgcctgtggtcc

SEQ ID NO: 1121 - DNA, 20 bp, synthetic construct
  misc_feature 1..20: note = B2M gRNA target site sequence
  source 1..20: mol_type = other DNA
gcctgtggtcccagctgctc

SEQ ID NO: 1122 - DNA, 20 bp, synthetic construct
  misc_feature 1..20: note = B2M gRNA target site sequence
  source 1..20: mol_type = other DNA
tgtggtcccagctgctccgg

SEQ ID NO: 1123 - DNA, 20 bp, synthetic construct
  misc_feature 1..20: note = B2M gRNA target site sequence
  source 1..20: mol_type = other DNA
tcccagctgctccggtggct

SEQ ID NO: 1124 - DNA, 20 bp, synthetic construct
  misc_feature 1..20: note = B2M gRNA target site sequence
  source 1..20: mol_type = other DNA
cccagctgctccggtggctg

SEQ ID NO: 1125 - DNA, 20 bp, synthetic construct
  misc_feature 1..20: note = B2M gRNA target site sequence
  source 1..20: mol_type = other DNA
agctgctccggtggctgagg

SEQ ID NO: 1126 - DNA, 20 bp, synthetic construct
  misc_feature 1..20: note = B2M gRNA target site sequence
  source 1..20: mol_type = other DNA
gctgctccggtggctgaggc

SEQ ID NO: 1127 - DNA, 20 bp, synthetic construct
  misc_feature 1..20: note = B2M gRNA target site sequence
  source 1..20: mol_type = other DNA
tgctccggtggctgaggcgg

SEQ ID NO: 1128 - DNA, 20 bp, synthetic construct
  misc_feature 1..20: note = B2M gRNA target site sequence
  source 1..20: mol_type = other DNA
gctccggtggctgaggcggg

SEQ ID NO: 1129 - DNA, 20 bp, synthetic construct
  misc_feature 1..20: note = B2M gRNA target site sequence
  source 1..20: mol_type = other DNA
ctgaggcgggaggatctctt

SEQ ID NO: 1130 - DNA, 20 bp, synthetic construct
  misc_feature 1..20: note = B2M gRNA target site sequence
  source 1..20: mol_type = other DNA
gcgggaggatctcttgagct

SEQ ID NO: 1131 - DNA, 20 bp, synthetic construct
  misc_feature 1..20: note = B2M gRNA target site sequence
  source 1..20: mol_type = other DNA
cgggaggatctcttgagctt

SEQ ID NO: 1132 - DNA, 20 bp, synthetic construct
  misc_feature 1..20: note = B2M gRNA target site sequence
  source 1..20: mol_type = other DNA
tctcttgagcttaggctttt

SEQ ID NO: 1133 - DNA, 20 bp, synthetic construct
  misc_feature 1..20: note = B2M gRNA target site sequence
  source 1..20: mol_type = other DNA
cttaggcttttgagctatca

SEQ ID NO: 1134 - DNA, 20 bp, synthetic construct
  misc_feature 1..20: note = B2M gRNA target site sequence
  source 1..20: mol_type = other DNA
cttttgagctatcatggcgc

SEQ ID NO: 1135 - DNA, 20 bp, synthetic construct
  misc_feature 1..20: note = B2M gRNA target site sequence
  source 1..20: mol_type = other DNA
atcatggcgccagtgcactc

SEQ ID NO: 1136 - DNA, 20 bp, synthetic construct
  misc_feature 1..20: note = B2M gRNA target site sequence
  source 1..20: mol_type = other DNA
ggcgccagtgcactccagcg

SEQ ID NO: 1137 - DNA, 20 bp, synthetic construct
  misc_feature 1..20: note = B2M gRNA target site sequence
  source 1..20: mol_type = other DNA
gcgccagtgcactccagcgt

SEQ ID NO: 1138 - DNA, 20 bp, synthetic construct
  misc_feature 1..20: note = B2M gRNA target site sequence
  source 1..20: mol_type = other DNA
gtgcactccagcgtgggcaa

SEQ ID NO: 1139 - DNA, 20 bp, synthetic construct
  misc_feature 1..20: note = B2M gRNA target site sequence
  source 1..20: mol_type = other DNA
gcactccagcgtgggcaaca

SEQ ID NO: 1140 - DNA, 20 bp, synthetic construct
  misc_feature 1..20: note = B2M gRNA target site sequence
  source 1..20: mol_type = other DNA
tccagcgtgggcaacagagc

SEQ ID NO: 1141 - DNA, 20 bp, synthetic construct
  misc_feature 1..20: note = B2M gRNA target site sequence
  source 1..20: mol_type = other DNA
cgagaccctgtctctcaaaa

SEQ ID NO: 1142 - DNA, 20 bp, synthetic construct
  misc_feature 1..20: note = B2M gRNA target site sequence
  source 1..20: mol_type = other DNA
aaaaaagaaaaaaaaaaaaa

SEQ ID NO: 1143 - DNA, 20 bp, synthetic construct
  misc_feature 1..20: note = B2M gRNA target site sequence
  source 1..20: mol_type = other DNA
aagaaaaaaaaaaaaaaaga

SEQ ID NO: 1144 - DNA, 20 bp, synthetic construct
  misc_feature 1..20: note = B2M gRNA target site sequence
  source 1..20: mol_type = other DNA
gaaaaaaaaaaaaaaagaaa

SEQ ID NO: 1145 - DNA, 20 bp, synthetic construct
  misc_feature 1..20: note = B2M gRNA target site sequence
  source 1..20: mol_type = other DNA
aaaaaaaaaaagaaagagaa

SEQ ID NO: 1146 - DNA, 20 bp, synthetic construct
  misc_feature 1..20: note = B2M gRNA target site sequence
  source 1..20: mol_type = other DNA
aaaaaagaaagagaaaagaa

SEQ ID NO: 1147 - DNA, 20 bp, synthetic construct
  misc_feature 1..20: note = B2M gRNA target site sequence
  source 1..20: mol_type = other DNA
aagaaagagaaaagaaaaga

SEQ ID NO: 1148 - DNA, 20 bp, synthetic construct
  misc_feature 1..20: note = B2M gRNA target site sequence
  source 1..20: mol_type = other DNA
aagagaaaagaaaagaaaga

SEQ ID NO: 1149 - DNA, 20 bp, synthetic construct
  misc_feature 1..20: note = B2M gRNA target site sequence
  source 1..20: mol_type = other DNA
agaaaagaaaagaaagaaag

SEQ ID NO: 1150 - DNA, 20 bp, synthetic construct
  misc_feature 1..20: note = B2M gRNA target site sequence
  source 1..20: mol_type = other DNA
agaaaagaaagaaagaagtg

SEQ ID NO: 1151 - DNA, 20 bp, synthetic construct
  misc_feature 1..20: note = B2M gRNA target site sequence
  source 1..20: mol_type = other DNA
gaaaagaaagaaagaagtga

SEQ ID NO: 1152 - DNA, 20 bp, synthetic construct
  misc_feature 1..20: note = B2M gRNA target site sequence
  source 1..20: mol_type = other DNA
agaaagaagtgaaggtttgt

SEQ ID NO: 1153 - DNA, 20 bp, synthetic construct
  misc_feature 1..20: note = B2M gRNA target site sequence
  source 1..20: mol_type = other DNA
agaagtgaaggtttgtcagt

SEQ ID NO: 1154 - DNA, 20 bp, synthetic construct
  misc_feature 1..20: note = B2M gRNA target site sequence
  source 1..20: mol_type = other DNA
gaagtgaaggtttgtcagtc

SEQ ID NO: 1155 - DNA, 20 bp, synthetic construct
  misc_feature 1..20: note = B2M gRNA target site sequence
  source 1..20: mol_type = other DNA
aagtgaaggtttgtcagtca

SEQ ID NO: 1156 - DNA, 20 bp, synthetic construct
  misc_feature 1..20: note = B2M gRNA target site sequence
  source 1..20: mol_type = other DNA
agtgaaggtttgtcagtcag

SEQ ID NO: 1157 - DNA, 20 bp, synthetic construct
  misc_feature 1..20: note = B2M gRNA target site sequence
  source 1..20: mol_type = other DNA
tgaaggtttgtcagtcaggg

SEQ ID NO: 1158 - DNA, 20 bp, synthetic construct
  misc_feature 1..20: note = B2M gRNA target site sequence
  source 1..20: mol_type = other DNA
gagctgtaaaaccattaata

SEQ ID NO: 1159 - DNA, 20 bp, synthetic construct
  misc_feature 1..20: note = B2M gRNA target site sequence
  source 1..20: mol_type = other DNA
accattaataaagataatcc

SEQ ID NO: 1160 - DNA, 20 bp, synthetic construct
  misc_feature 1..20: note = B2M gRNA target site sequence
  source 1..20: mol_type = other DNA
ttaataaagataatccaaga

SEQ ID NO: 1161 - DNA, 20 bp, synthetic construct
  misc_feature 1..20: note = B2M gRNA target site sequence
  source 1..20: mol_type = other DNA
gataatccaagatggttacc

SEQ ID NO: 1162 - DNA, 20 bp, synthetic construct
  misc_feature 1..20: note = B2M gRNA target site sequence
  source 1..20: mol_type = other DNA
agatggttaccaagactgtt

SEQ ID NO: 1163 - DNA, 20 bp, synthetic construct
  misc_feature 1..20: note = B2M gRNA target site sequence
  source 1..20: mol_type = other DNA
gatggttaccaagactgttg

SEQ ID NO: 1164 - DNA, 20 bp, synthetic construct
  misc_feature 1..20: note = B2M gRNA target site sequence
  source 1..20: mol_type = other DNA
accaagactgttgaggacgc

SEQ ID NO: 1165 - DNA, 20 bp, synthetic construct
  misc_feature 1..20: note = B2M gRNA target site sequence
  source 1..20: mol_type = other DNA
caagactgttgaggacgcca

SEQ ID NO: 1166 - DNA, 20 bp, synthetic construct
  misc_feature 1..20: note = B2M gRNA target site sequence
  source 1..20: mol_type = other DNA
ttgaggacgccagagatctt

SEQ ID NO: 1167 - DNA, 20 bp, synthetic construct
  misc_feature 1..20: note = B2M gRNA target site sequence
  source 1..20: mol_type = other DNA
agagatcttgagcactttct

SEQ ID NO: 1168 - DNA, 20 bp, synthetic construct
  misc_feature 1..20: note = B2M gRNA target site sequence
  source 1..20: mol_type = other DNA
ttgagcactttctaagtacc

SEQ ID NO: 1169 - DNA, 20 bp, synthetic construct
  misc_feature 1..20: note = B2M gRNA target site sequence
  source 1..20: mol_type = other DNA
taagtacctggcaatacact

SEQ ID NO: 1170 - DNA, 20 bp, synthetic construct
  misc_feature 1..20: note = B2M gRNA target site sequence
  source 1..20: mol_type = other DNA
agcgcgctcaccttttcctc

SEQ ID NO: 1171 - DNA, 20 bp, synthetic construct
  misc_feature 1..20: note = B2M gRNA target site sequence
  source 1..20: mol_type = other DNA
ctctggcaaaacatgatcga

SEQ ID NO: 1172 - DNA, 20 bp, synthetic construct
  misc_feature 1..20: note = B2M gRNA target site sequence
  source 1..20: mol_type = other DNA
tggcaaaacatgatcgaaag

SEQ ID NO: 1173 - DNA, 20 bp, synthetic construct
  misc_feature 1..20: note = B2M gRNA target site sequence
  source 1..20: mol_type = other DNA
aagcagaatgttttgatcat

SEQ ID NO: 1174 - DNA, 20 bp, synthetic construct
  misc_feature 1..20: note = B2M gRNA target site sequence
  source 1..20: mol_type = other DNA
tacaatttatttacaacata

SEQ ID NO: 1175 - DNA, 20 bp, synthetic construct
  misc_feature 1..20: note = B2M gRNA target site sequence
  source 1..20: mol_type = other DNA
acaatttatttacaacataa

SEQ ID NO: 1176 - DNA, 20 bp, synthetic construct
  misc_feature 1..20: note = B2M gRNA target site sequence
  source 1..20: mol_type = other DNA
gtatatatcaccaccattac

SEQ ID NO: 1177 - DNA, 20 bp, synthetic construct
  misc_feature 1..20: note = B2M gRNA target site sequence
  source 1..20: mol_type = other DNA
ccaccattactggtatttgc

SEQ ID NO: 1178 - DNA, 20 bp, synthetic construct
  misc_feature 1..20: note = B2M gRNA target site sequence
  source 1..20: mol_type = other DNA
ctggtatttgctggttatgt

SEQ ID NO: 1179 - DNA, 20 bp, synthetic construct
  misc_feature 1..20: note = B2M gRNA target site sequence
  source 1..20: mol_type = other DNA
tcttattttgaaaatttcca

SEQ ID NO: 1180 - DNA, 20 bp, synthetic construct
  misc_feature 1..20: note = B2M gRNA target site sequence
  source 1..20: mol_type = other DNA
aaagtaatacatgccatgca

SEQ ID NO: 1181 - DNA, 20 bp, synthetic construct
  misc_feature 1..20: note = B2M gRNA target site sequence
  source 1..20: mol_type = other DNA
tgccatgcatagaccatttc

SEQ ID NO: 1182 - DNA, 20 bp, synthetic construct
  misc_feature 1..20: note = B2M gRNA target site sequence
  source 1..20: mol_type = other DNA
catgcatagaccatttctgg

SEQ ID NO: 1183 - DNA, 20 bp, synthetic construct
  misc_feature 1..20: note = B2M gRNA target site sequence
  source 1..20: mol_type = other DNA
ccatttctggaagataccac

SEQ ID NO: 1184 - DNA, 20 bp, synthetic construct
  misc_feature 1..20: note = B2M gRNA target site sequence
  source 1..20: mol_type = other DNA
tgtaatgatgattgcctctg

SEQ ID NO: 1185 - DNA, 20 bp, synthetic construct
  misc_feature 1..20: note = B2M gRNA target site sequence
  source 1..20: mol_type = other DNA
gtaatgatgattgcctctga

SEQ ID NO: 1186 - DNA, 20 bp, synthetic construct
  misc_feature 1..20: note = B2M gRNA target site sequence
  source 1..20: mol_type = other DNA
ttcctcctctgacctgtgtg

SEQ ID NO: 1187 - DNA, 20 bp, synthetic construct
  misc_feature 1..20: note = B2M gRNA target site sequence
  source 1..20: mol_type = other DNA
tcctcctctgacctgtgtgt

SEQ ID NO: 1188 - DNA, 20 bp, synthetic construct
  misc_feature 1..20: note = B2M gRNA target site sequence
  source 1..20: mol_type = other DNA
gttttgtttttgttttactg

SEQ ID NO: 1189 - DNA, 20 bp, synthetic construct
  misc_feature 1..20: note = B2M gRNA target site sequence
  source 1..20: mol_type = other DNA
ttttgtttttgttttactgt

SEQ ID NO: 1190 - DNA, 20 bp, synthetic construct
  misc_feature 1..20: note = B2M gRNA target site sequence
  source 1..20: mol_type = other DNA
gtgggcataaattaattttt

SEQ ID NO: 1191 - DNA, 20 bp, synthetic construct
  misc_feature 1..20: note = B2M gRNA target site sequence
  source 1..20: mol_type = other DNA
cataaattaatttttcagtt

SEQ ID NO: 1192 - DNA, 20 bp, synthetic construct
  misc_feature 1..20: note = B2M gRNA target site sequence
  source 1..20: mol_type = other DNA
ttaatttttcagttaagttt

SEQ ID NO: 1193 - DNA, 20 bp, synthetic construct
  misc_feature 1..20: note = B2M gRNA target site sequence
  source 1..20: mol_type = other DNA
atttttcagttaagttttgg

SEQ ID NO: 1194 - DNA, 20 bp, synthetic construct
  misc_feature 1..20: note = B2M gRNA target site sequence
  source 1..20: mol_type = other DNA
aagcttaaataactctccaa

SEQ ID NO: 1195 - DNA, 20 bp, synthetic construct
  misc_feature 1..20: note = B2M gRNA target site sequence
  source 1..20: mol_type = other DNA
ataactctccaaaagtcata

SEQ ID NO: 1196 - DNA, 20 bp, synthetic construct
  misc_feature 1..20: note = B2M gRNA target site sequence
  source 1..20: mol_type = other DNA
ctctccaaaagtcataaagc

SEQ ID NO: 1197 - DNA, 20 bp, synthetic construct
  misc_feature 1..20: note = B2M gRNA target site sequence
  source 1..20: mol_type = other DNA
aaagtcataaagccagtaac

SEQ ID NO: 1198 - DNA, 20 bp, synthetic construct
  misc_feature 1..20: note = B2M gRNA target site sequence
  source 1..20: mol_type = other DNA
cataaagccagtaactggtt

SEQ ID NO: 1199 - DNA, 20 bp, synthetic construct
  misc_feature 1..20: note = B2M gRNA target site sequence
  source 1..20: mol_type = other DNA
gttgagcccaaattcaaacc

SEQ ID NO: 1200 - DNA, 20 bp, synthetic construct
  misc_feature 1..20: note = B2M gRNA target site sequence
  source 1..20: mol_type = other DNA
tctgatacttgtcctcttct

SEQ ID NO: 1201 - DNA, 20 bp, synthetic construct
  misc_feature 1..20: note = B2M gRNA target site sequence
  source 1..20: mol_type = other DNA
tacttgtcctcttcttagaa

SEQ ID NO: 1202 - DNA, 20 bp, synthetic construct
  misc_feature 1..20: note = B2M gRNA target site sequence
  source 1..20: mol_type = other DNA
cctcttcttagaaaagatta

SEQ ID NO: 1203 - DNA, 20 bp, synthetic construct
  misc_feature 1..20: note = B2M gRNA target site sequence
  source 1..20: mol_type = other DNA
tcttgccgccttccctcaaa

SEQ ID NO: 1204 - DNA, 20 bp, synthetic construct
  misc_feature 1..20: note = B2M gRNA target site sequence
  source 1..20: mol_type = other DNA
ttgccgccttccctcaaaca

SEQ ID NO: 1205 - DNA, 20 bp, synthetic construct
  misc_feature 1..20: note = B2M gRNA target site sequence
  source 1..20: mol_type = other DNA
gccgccttccctcaaacaga

SEQ ID NO: 1206 - DNA, 20 bp, synthetic construct
  misc_feature 1..20: note = B2M gRNA target site sequence
  source 1..20: mol_type = other DNA
ttccctcaaacagagagttc

SEQ ID NO: 1207 - DNA, 20 bp, synthetic construct
  misc_feature 1..20: note = B2M gRNA target site sequence
  source 1..20: mol_type = other DNA
tccctcaaacagagagttcc

SEQ ID NO: 1208 - DNA, 20 bp, synthetic construct
  misc_feature 1..20: note = B2M gRNA target site sequence
  source 1..20: mol_type = other DNA
ctcaaacagagagttccagg

SEQ ID NO: 1209 - DNA, 20 bp, synthetic construct
  misc_feature 1..20: note = B2M gRNA target site sequence
  source 1..20: mol_type = other DNA
tcaaacagagagttccaggc

SEQ ID NO: 1210 - DNA, 20 bp, synthetic construct
  misc_feature 1..20: note = B2M gRNA target site sequence
  source 1..20: mol_type = other DNA
gaatctgtgctctgatccct

SEQ ID NO: 1211 - DNA, 20 bp, synthetic construct
  misc_feature 1..20: note = B2M gRNA target site sequence
  source 1..20: mol_type = other DNA
aatctgtgctctgatccctg

SEQ ID NO: 1212 - DNA, 20 bp, synthetic construct
  misc_feature 1..20: note = B2M gRNA target site sequence
  source 1..20: mol_type = other DNA
atttaatatgttcttattat

SEQ ID NO: 1213 - DNA, 20 bp, synthetic construct
  misc_feature 1..20: note = B2M gRNA target site sequence
  source 1..20: mol_type = other DNA
taatatgttcttattattag

SEQ ID NO: 1214 - DNA, 20 bp, synthetic construct
  misc_feature 1..20: note = B2M gRNA target site sequence
  source 1..20: mol_type = other DNA
tgttcttattattagaagct

SEQ ID NO: 1215 - DNA, 20 bp, synthetic construct
  misc_feature 1..20: note = B2M gRNA target site sequence
  source 1..20: mol_type = other DNA
ttattagaagctcagatgca

SEQ ID NO: 1216 - DNA, 20 bp, synthetic construct
  misc_feature 1..20: note = B2M gRNA target site sequence
  source 1..20: mol_type = other DNA
attagaagctcagatgcaaa

SEQ ID NO: 1217 - DNA, 20 bp, synthetic construct
  misc_feature 1..20: note = B2M gRNA target site sequence
  source 1..20: mol_type = other DNA
tcagatgcaaagagctctct

SEQ ID NO: 1218 - DNA, 20 bp, synthetic construct
  misc_feature 1..20: note = B2M gRNA target site sequence
  source 1..20: mol_type = other DNA
tttaatgttatgaaaaaaat

SEQ ID NO: 1219 - DNA, 20 bp, synthetic construct
  misc_feature 1..20: note = B2M gRNA target site sequence
  source 1..20: mol_type = other DNA
ttaatgttatgaaaaaaatc

SEQ ID NO: 1220 - DNA, 20 bp, synthetic construct
  misc_feature 1..20: note = B2M gRNA target site sequence
  source 1..20: mol_type = other DNA
gaaaaaaatcaggtcttcat

SEQ ID NO: 1221 - DNA, 20 bp, synthetic construct
  misc_feature 1..20: note = B2M gRNA target site sequence
  source 1..20: mol_type = other DNA
ttccccaatccacctcttga

SEQ ID NO: 1222 - DNA, 20 bp, synthetic construct
  misc_feature 1..20: note = B2M gRNA target site sequence
  source 1..20: mol_type = other DNA
tccccaatccacctcttgat

SEQ ID NO: 1223 - DNA, 20 bp, synthetic construct
  misc_feature 1..20: note = B2M gRNA target site sequence
  source 1..20: mol_type = other DNA
ccccaatccacctcttgatg

SEQ ID NO: 1224 - DNA, 20 bp, synthetic construct
  misc_feature 1..20: note = B2M gRNA target site sequence
  source 1..20: mol_type = other DNA
aatccacctcttgatggggc

SEQ ID NO: 1225 - DNA, 20 bp, synthetic construct
  misc_feature 1..20: note = B2M gRNA target site sequence
  source 1..20: mol_type = other DNA
ccacctcttgatggggctag

SEQ ID NO: 1226 - DNA, 20 bp, synthetic construct
  misc_feature 1..20: note = B2M gRNA target site sequence
  source 1..20: mol_type = other DNA
tagtagcctttccttaatga

SEQ ID NO: 1227 - DNA, 20 bp, synthetic construct
  misc_feature 1..20: note = B2M gRNA target site sequence
  source 1..20: mol_type = other DNA
agtagcctttccttaatgat

SEQ ID NO: 1228 - DNA, 20 bp, synthetic construct
  misc_feature 1..20: note = B2M gRNA target site sequence
  source 1..20: mol_type = other DNA
gtagcctttccttaatgata

SEQ ID NO: 1229 - DNA, 20 bp, synthetic construct
  misc_feature 1..20: note = B2M gRNA target site sequence
  source 1..20: mol_type = other DNA
ccttaatgatagggtgtttc

SEQ ID NO: 1230 - DNA, 20 bp, synthetic construct
  misc_feature 1..20: note = B2M gRNA target site sequence
  source 1..20: mol_type = other DNA
ttaatgatagggtgtttcta

SEQ ID NO: 1231 - DNA, 20 bp, synthetic construct
  misc_feature 1..20: note = B2M gRNA target site sequence
  source 1..20: mol_type = other DNA
aatgatagggtgtttctaga

SEQ ID NO: 1232 - DNA, 20 bp, synthetic construct
  misc_feature 1..20: note = B2M gRNA target site sequence
  source 1..20: mol_type = other DNA
tgtttctagagagatatatc

SEQ ID NO: 1233 - DNA, 20 bp, synthetic construct
  misc_feature 1..20: note = B2M gRNA target site sequence
  source 1..20: mol_type = other DNA
ctagagagatatatctggtc

SEQ ID NO: 1234 - DNA, 20 bp, synthetic construct
  misc_feature 1..20: note = B2M gRNA target site sequence
  source 1..20: mol_type = other DNA
tagagagatatatctggtca

SEQ ID NO: 1235 - DNA, 20 bp, synthetic construct
  misc_feature 1..20: note = B2M gRNA target site sequence
  source 1..20: mol_type = other DNA
agagatatatctggtcaagg

SEQ ID NO: 1236 - DNA, 20 bp, synthetic construct
  misc_feature 1..20: note = B2M gRNA target site sequence
  source 1..20: mol_type = other DNA
tatatctggtcaaggtggcc

SEQ ID NO: 1237 - DNA, 20 bp, synthetic construct
  misc_feature 1..20: note = B2M gRNA target site sequence
  source 1..20: mol_type = other DNA
ggtactcctccttctcccca

SEQ ID NO: 1238 - DNA, 20 bp, synthetic construct
  misc_feature 1..20: note = B2M gRNA target site sequence
  source 1..20: mol_type = other DNA
tccttctccccacagcctcc

SEQ ID NO: 1239 - DNA, 20 bp, synthetic construct
  misc_feature 1..20: note = B2M gRNA target site sequence
  source 1..20: mol_type = other DNA
ctccccacagcctcccagac

SEQ ID NO: 1240 - DNA, 20 bp, synthetic construct
  misc_feature 1..20: note = B2M gRNA target site sequence
  source 1..20: mol_type = other DNA
tccccacagcctcccagaca

SEQ ID NO: 1241 - DNA, 20 bp, synthetic construct
  misc_feature 1..20: note = B2M gRNA target site sequence
  source 1..20: mol_type = other DNA
cccacagcctcccagacaag

SEQ ID NO: 1242 - DNA, 20 bp, synthetic construct
  misc_feature 1..20: note = B2M gRNA target site sequence
  source 1..20: mol_type = other DNA
ccacagcctcccagacaagg

SEQ ID NO: 1243 - DNA, 20 bp, synthetic construct
  misc_feature 1..20: note = B2M gRNA target site sequence
  source 1..20: mol_type = other DNA
acagcctcccagacaaggag

SEQ ID NO: 1244 - DNA, 20 bp, synthetic construct
  misc_feature 1..20: note = B2M gRNA target site sequence
  source 1..20: mol_type = other DNA
gcctcccagacaaggaggag

SEQ ID NO: 1245 - DNA, 20 bp, synthetic construct
  misc_feature 1..20: note = B2M gRNA target site sequence
  source 1..20: mol_type = other DNA
aaggaggagtagctgccttt

SEQ ID NO: 1246 - DNA, 20 bp, synthetic construct
  misc_feature 1..20: note = B2M gRNA target site sequence
  source 1..20: mol_type = other DNA
tgatcatgtaccctgaatat

SEQ ID NO: 1247 - DNA, 20 bp, synthetic construct
  misc_feature 1..20: note = B2M gRNA target site sequence
  source 1..20: mol_type = other DNA
ctgaatataagtgtatttaa

SEQ ID NO: 1248 - DNA, 20 bp, synthetic construct
  misc_feature 1..20: note = B2M gRNA target site sequence
  source 1..20: mol_type = other DNA
gaattttatacacatatatt

SEQ ID NO: 1249 - DNA, 20 bp, synthetic construct
  misc_feature 1..20: note = B2M gRNA target site sequence
  source 1..20: mol_type = other DNA
ttagtgtcaatctgtatatt

SEQ ID NO: 1250 - DNA, 20 bp, synthetic construct
  misc_feature 1..20: note = B2M gRNA target site sequence
  source 1..20: mol_type = other DNA
gtgtcaatctgtatatttag

SEQ ID NO: 1251 - DNA, 20 bp, synthetic construct
  misc_feature 1..20: note = B2M gRNA target site sequence
  source 1..20: mol_type = other DNA
ttcattttcaatgaaaaata

SEQ ID NO: 1252 - DNA, 20 bp, synthetic construct
  misc_feature 1..20: note = B2M gRNA target site sequence
  source 1..20: mol_type = other DNA
cattttcaatgaaaaatata

SEQ ID NO: 1253 - DNA, 20 bp, synthetic construct
  misc_feature 1..20: note = B2M gRNA target site sequence
  source 1..20: mol_type = other DNA
attttcttcccacttcccca

SEQ ID NO: 1254 - DNA, 20 bp, synthetic construct
  misc_feature 1..20: note = B2M gRNA target site sequence
  source 1..20: mol_type = other DNA
tcttcccacttccccatgga

SEQ ID NO: 1255 - DNA, 20 bp, synthetic construct
  misc_feature 1..20: note = B2M gRNA target site sequence
  source 1..20: mol_type = other DNA
ccacttccccatggatggtc

SEQ ID NO: 1256 - DNA, 20 bp, synthetic construct
  misc_feature 1..20: note = B2M gRNA target site sequence
  source 1..20: mol_type = other DNA
tctagtcatgcctctcattt

SEQ ID NO: 1257 - DNA, 20 bp, synthetic construct
  misc_feature 1..20: note = B2M gRNA target site sequence
  source 1..20: mol_type = other DNA
gtcatgcctctcattttgga

SEQ ID NO: 1258 - DNA, 20 bp, synthetic construct
  misc_feature 1..20: note = B2M gRNA target site sequence
  source 1..20: mol_type = other DNA
aagtactgtttctgaaacat

SEQ ID NO: 1259 - DNA, 20 bp, synthetic construct
  misc_feature 1..20: note = B2M gRNA target site sequence
  source 1..20: mol_type = other DNA
agtactgtttctgaaacatt

SEQ ID NO: 1260 - DNA, 20 bp, synthetic construct
  misc_feature 1..20: note = B2M gRNA target site sequence
  source 1..20: mol_type = other DNA
taggcaatatattcccaacc

SEQ ID NO: 1261 - DNA, 20 bp, synthetic construct
  misc_feature 1..20: note = B2M gRNA target site sequence
  source 1..20: mol_type = other DNA
caatatattcccaacctggc

SEQ ID NO: 1262 - DNA, 20 bp, synthetic construct
  misc_feature 1..20: note = B2M gRNA target site sequence
  source 1..20: mol_type = other DNA
ttcccaacctggctagttta

SEQ ID NO: 1263 - DNA, 20 bp, synthetic construct
  misc_feature 1..20: note = B2M gRNA target site sequence
  source 1..20: mol_type = other DNA
tagtttacagcaatcacctg

SEQ ID NO: 1264 - DNA, 20 bp, synthetic construct
  misc_feature 1..20: note = B2M gRNA target site sequence
  source 1..20: mol_type = other DNA
attactccatttgatcataa

SEQ ID NO: 1265 - DNA, 20 bp, synthetic construct
  misc_feature 1..20: note = B2M gRNA target site sequence
  source 1..20: mol_type = other DNA
ctccatttgatcataatgga

SEQ ID NO: 1266 - DNA, 20 bp, synthetic construct
  misc_feature 1..20: note = B2M gRNA target site sequence
  source 1..20: mol_type = other DNA
atgttctgtcccatttgcca

SEQ ID NO: 1267 - DNA, 20 bp, synthetic construct
  misc_feature 1..20: note = B2M gRNA target site sequence
  source 1..20: mol_type = other DNA
ctatccctgttgtattttat

SEQ ID NO: 1268 - DNA, 20 bp, synthetic construct
  misc_feature 1..20: note = B2M gRNA target site sequence
  source 1..20: mol_type = other DNA
tatccctgttgtattttatc

SEQ ID NO: 1269 - DNA, 20 bp, synthetic construct
  misc_feature 1..20: note = B2M gRNA target site sequence
  source 1..20: mol_type = other DNA
cgggtccaactcaaccattt

SEQ ID NO: 1270 - DNA, 20 bp, synthetic construct
  misc_feature 1..20: note = B2M gRNA target site sequence
  source 1..20: mol_type = other DNA
gggtccaactcaaccattta

SEQ ID NO: 1271 - DNA, 20 bp, synthetic construct
  misc_feature 1..20: note = B2M gRNA target site sequence
  source 1..20: mol_type = other DNA
caaccatttaaggtatttgc

SEQ ID NO: 1272 - DNA, 20 bp, synthetic construct
  misc_feature 1..20: note = B2M gRNA target site sequence
  source 1..20: mol_type = other DNA
tgccagctcttgtatgcatt

SEQ ID NO: 1273 - DNA, 20 bp, synthetic construct
  misc_feature 1..20: note = B2M gRNA target site sequence
  source 1..20: mol_type = other DNA
gccagctcttgtatgcattt

SEQ ID NO: 1274 - DNA, 20 bp, synthetic construct
  misc_feature 1..20: note = B2M gRNA target site sequence
  source 1..20: mol_type = other DNA
ggttttgtttctttgttttt

SEQ ID NO: 1275 - DNA, 20 bp, synthetic construct
  misc_feature 1..20: note = B2M gRNA target site sequence
  source 1..20: mol_type = other DNA
tgttttttagctcatgaaat

SEQ ID NO: 1276 - DNA, 20 bp, synthetic construct
  misc_feature 1..20: note = B2M gRNA target site sequence
  source 1..20: mol_type = other DNA
gttttttagctcatgaaatt

SEQ ID NO: 1277 - DNA, 20 bp, synthetic construct
  misc_feature 1..20: note = B2M gRNA target site sequence
  source 1..20: mol_type = other DNA
agctcatgaaattaggtaca

SEQ ID NO: 1278 - DNA, 20 bp, synthetic construct
  misc_feature 1..20: note = B2M gRNA target site sequence
  source 1..20: mol_type = other DNA
catgaaattaggtacaaagt

SEQ ID NO: 1279 - DNA, 20 bp, synthetic construct
  misc_feature 1..20: note = B2M gRNA target site sequence
  source 1..20: mol_type = other DNA
tgaaattaggtacaaagtca

SEQ ID NO: 1280 - DNA, 20 bp, synthetic construct
  misc_feature 1..20: note = B2M gRNA target site sequence
  source 1..20: mol_type = other DNA
aaattaggtacaaagtcaga

SEQ ID NO: 1281 - DNA, 20 bp, synthetic construct
  misc_feature 1..20: note = B2M gRNA target site sequence
  source 1..20: mol_type = other DNA
aattaggtacaaagtcagag

SEQ ID NO: 1282 - DNA, 20 bp, synthetic construct
  misc_feature 1..20: note = B2M gRNA target site sequence
  source 1..20: mol_type = other DNA
attaggtacaaagtcagaga

SEQ ID NO: 1283 - DNA, 20 bp, synthetic construct
  misc_feature 1..20: note = B2M gRNA target site sequence
  source 1..20: mol_type = other DNA
ttaggtacaaagtcagagag

SEQ ID NO: 1284 - DNA, 20 bp, synthetic construct
  misc_feature 1..20: note = B2M gRNA target site sequence
  source 1..20: mol_type = other DNA
tacaaagtcagagaggggtc

SEQ ID NO: 1285 - DNA, 20 bp, synthetic construct
  misc_feature 1..20: note = B2M gRNA target site sequence
  source 1..20: mol_type = other DNA
gggtctggcatataaaacct

SEQ ID NO: 1286 - DNA, 20 bp, synthetic construct
  misc_feature 1..20: note = B2M gRNA target site sequence
  source 1..20: mol_type = other DNA
tctggcatataaaacctcag

SEQ ID NO: 1287 - DNA, 20 bp, synthetic construct
  misc_feature 1..20: note = B2M gRNA target site sequence
  source 1..20: mol_type = other DNA
ataaaacctcagcagaaata

SEQ ID NO: 1288 - DNA, 20 bp, synthetic construct
  misc_feature 1..20: note = B2M gRNA target site sequence
  source 1..20: mol_type = other DNA
aaaacctcagcagaaataaa

SEQ ID NO: 1289 - DNA, 20 bp, synthetic construct
  misc_feature 1..20: note = B2M gRNA target site sequence
  source 1..20: mol_type = other DNA
aaacctcagcagaaataaag

SEQ ID NO: 1290 - DNA, 20 bp, synthetic construct
  misc_feature 1..20: note = B2M gRNA target site sequence
  source 1..20: mol_type = other DNA
aataaagaggttttgttgtt

SEQ ID NO: 1291 - DNA, 20 bp, synthetic construct
  misc_feature 1..20: note = B2M gRNA target site sequence
  source 1..20: mol_type = other DNA
aagaggttttgttgtttggt

SEQ ID NO: 1292 - DNA, 20 bp, synthetic construct
  misc_feature 1..20: note = B2M gRNA target site sequence
  source 1..20: mol_type = other DNA
tgtttggtaagaacatacct

SEQ ID NO: 1293 - DNA, 20 bp, synthetic construct
  misc_feature 1..20: note = B2M gRNA target site sequence
  source 1..20: mol_type = other DNA
gtttggtaagaacatacctt

SEQ ID NO: 1294 - DNA, 20 bp, synthetic construct
  misc_feature 1..20: note = B2M gRNA target site sequence
  source 1..20: mol_type = other DNA
ggtaagaacataccttgggt

SEQ ID NO: 1295 - DNA, 20 bp, synthetic construct
  misc_feature 1..20: note = B2M gRNA target site sequence
  source 1..20: mol_type = other DNA
agaacataccttgggttggt

SEQ ID NO: 1296 - DNA, 20 bp, synthetic construct
  misc_feature 1..20: note = B2M gRNA target site sequence
  source 1..20: mol_type = other DNA
gaacataccttgggttggtt

SEQ ID NO: 1297 - DNA, 20 bp, synthetic construct
  misc_feature 1..20: note = B2M gRNA target site sequence
  source 1..20: mol_type = other DNA
taccttgggttggttgggca

SEQ ID NO: 1298 - DNA, 20 bp, synthetic construct
  misc_feature 1..20: note = B2M gRNA target site sequence
  source 1..20: mol_type = other DNA
cttgggttggttgggcacgg

SEQ ID NO: 1299 - DNA, 20 bp, synthetic construct
  misc_feature 1..20: note = B2M gRNA target site sequence
  source 1..20: mol_type = other DNA
tgcctgtaatcccaacactt

SEQ ID NO: 1300 - DNA, 20 bp, synthetic construct
  misc_feature 1..20: note = B2M gRNA target site sequence
  source 1..20: mol_type = other DNA
gcctgtaatcccaacacttt

SEQ ID NO: 1301 - DNA, 20 bp, synthetic construct
  misc_feature 1..20: note = B2M gRNA target site sequence
  source 1..20: mol_type = other DNA
ctgtaatcccaacactttgg

SEQ ID NO: 1302 - DNA, 20 bp, synthetic construct
  misc_feature 1..20: note = B2M gRNA target site sequence
  source 1..20: mol_type = other DNA
tgtaatcccaacactttggg

SEQ ID NO: 1303 - DNA, 20 bp, synthetic construct
  misc_feature 1..20: note = B2M gRNA target site sequence
  source 1..20: mol_type = other DNA
tcccaacactttgggaggcc

SEQ ID NO: 1304 - DNA, 20 bp, synthetic construct
  misc_feature 1..20: note = B2M gRNA target site sequence
  source 1..20: mol_type = other DNA
cccaacactttgggaggcca

SEQ ID NO: 1305 - DNA, 20 bp, synthetic construct
  misc_feature 1..20: note = B2M gRNA target site sequence
  source 1..20: mol_type = other DNA
aacactttgggaggccaagg

SEQ ID NO: 1306 - DNA, 20 bp, synthetic construct
  misc_feature 1..20: note = B2M gRNA target site sequence
  source 1..20: mol_type = other DNA
acactttgggaggccaaggc

SEQ ID NO: 1307 - DNA, 20 bp, synthetic construct
  misc_feature 1..20: note = B2M gRNA target site sequence
  source 1..20: mol_type = other DNA
caaggcaggctgatcacttg

SEQ ID NO: 1308 - DNA, 20 bp, synthetic construct
  misc_feature 1..20: note = B2M gRNA target site sequence
  source 1..20: mol_type = other DNA
gcaggctgatcacttgaagt

SEQ ID NO: 1309 - DNA, 20 bp, synthetic construct
  misc_feature 1..20: note = B2M gRNA target site sequence
  source 1..20: mol_type = other DNA
caggctgatcacttgaagtt

SEQ ID NO: 1310 - DNA, 20 bp, synthetic construct
  misc_feature 1..20: note = B2M gRNA target site sequence
  source 1..20: mol_type = other DNA
ggctgatcacttgaagttgg

SEQ ID NO: 1311 - DNA, 20 bp, synthetic construct
  misc_feature 1..20: note = B2M gRNA target site sequence
  source 1..20: mol_type = other DNA
tcacttgaagttgggagttc

SEQ ID NO: 1312 - DNA, 20 bp, synthetic construct
  misc_feature 1..20: note = B2M gRNA target site sequence
  source 1..20: mol_type = other DNA
tgaagttgggagttcaagac

SEQ ID NO: 1313 - DNA, 20 bp, synthetic construct
  misc_feature 1..20: note = B2M gRNA target site sequence
  source 1..20: mol_type = other DNA
ttgggagttcaagaccagcc

SEQ ID NO: 1314 - DNA, 20 bp, synthetic construct
  misc_feature 1..20: note = B2M gRNA target site sequence
  source 1..20: mol_type = other DNA
caagaccagcctggccaaca

SEQ ID NO: 1315 - DNA, 20 bp, synthetic construct
  misc_feature 1..20: note = B2M gRNA target site sequence
  source 1..20: mol_type = other DNA
ctgaaaatacaaaaattaac

SEQ ID NO: 1316 - DNA, 20 bp, synthetic construct
  misc_feature 1..20: note = B2M gRNA target site sequence
  source 1..20: mol_type = other DNA
tgaaaatacaaaaattaacc

SEQ ID NO: 1317 - DNA, 20 bp, synthetic construct
  misc_feature 1..20: note = B2M gRNA target site sequence
  source 1..20: mol_type = other DNA
atacaaaaattaaccaggca

SEQ ID NO: 1318 - DNA, 20 bp, synthetic construct
  misc_feature 1..20: note = B2M gRNA target site sequence
  source 1..20: mol_type = other DNA
caaaaattaaccaggcatgg

SEQ ID NO: 1319 - DNA, 20 bp, synthetic construct
  misc_feature 1..20: note = B2M gRNA target site sequence
  source 1..20: mol_type = other DNA
ggcatggtggtgtgtgcctg

SEQ ID NO: 1320 - DNA, 20 bp, synthetic construct
  misc_feature 1..20: note = B2M gRNA target site sequence
  source 1..20: mol_type = other DNA
gtggtgtgtgcctgtagtcc

SEQ ID NO: 1321 - DNA, 20 bp, synthetic construct
  misc_feature 1..20: note = B2M gRNA target site sequence
  source 1..20: mol_type = other DNA
tggtgtgtgcctgtagtccc

SEQ ID NO: 1322 - DNA, 20 bp, synthetic construct
  misc_feature 1..20: note = B2M gRNA target site sequence
  source 1..20: mol_type = other DNA
tcccaggaatcacttgaacc

SEQ ID NO: 1323 - DNA, 20 bp, synthetic construct
  misc_feature 1..20: note = B2M gRNA target site sequence
  source 1..20: mol_type = other DNA
cccaggaatcacttgaaccc

SEQ ID NO: 1324 - DNA, 20 bp, synthetic construct
  misc_feature 1..20: note = B2M gRNA target site sequence
  source 1..20: mol_type = other DNA
caggaatcacttgaacccag

SEQ ID NO: 1325 - DNA, 20 bp, synthetic construct
  misc_feature 1..20: note = B2M gRNA target site sequence
  source 1..20: mol_type = other DNA
aggaatcacttgaacccagg

SEQ ID NO: 1326 - DNA, 20 bp, synthetic construct
  misc_feature 1..20: note = B2M gRNA target site sequence
  source 1..20: mol_type = other DNA
aatcacttgaacccaggagg

SEQ ID NO: 1327 - DNA, 20 bp, synthetic construct
  misc_feature 1..20: note = B2M gRNA target site sequence
  source 1..20: mol_type = other DNA
tcacttgaacccaggaggcg

SEQ ID NO: 1328 - DNA, 20 bp, synthetic construct
  misc_feature 1..20: note = B2M gRNA target site sequence
  source 1..20: mol_type = other DNA
cacttgaacccaggaggcgg

SEQ ID NO: 1329 - DNA, 20 bp, synthetic construct
  misc_feature 1..20: note = B2M gRNA target site sequence
  source 1..20: mol_type = other DNA
aacccaggaggcggaggttg

SEQ ID NO: 1330 - DNA, 20 bp, synthetic construct
  misc_feature 1..20: note = B2M gRNA target site sequence
  source 1..20: mol_type = other DNA
caggaggcggaggttgcagt

SEQ ID NO: 1331 - DNA, 20 bp, synthetic construct
  misc_feature 1..20: note = B2M gRNA target site sequence
  source 1..20: mol_type = other DNA
ggcggaggttgcagtgagct

SEQ ID NO: 1332 - DNA, 20 bp, synthetic construct
  misc_feature 1..20: note = B2M gRNA target site sequence
  source 1..20: mol_type = other DNA
caccactgcacactgcactc

SEQ ID NO: 1333 - DNA, 20 bp, synthetic construct
  misc_feature 1..20: note = B2M gRNA target site sequence
  source 1..20: mol_type = other DNA
ctgcacactgcactccagcc

SEQ ID NO: 1334 - DNA, 20 bp, synthetic construct
  misc_feature 1..20: note = B2M gRNA target site sequence
  source 1..20: mol_type = other DNA
tgcacactgcactccagcct

SEQ ID NO: 1335 - DNA, 20 bp, synthetic construct
  misc_feature 1..20: note = B2M gRNA target site sequence
  source 1..20: mol_type = other DNA
ctgcactccagcctgggcaa

SEQ ID NO: 1336 - DNA, 20 bp, synthetic construct
  misc_feature 1..20: note = B2M gRNA target site sequence
  source 1..20: mol_type = other DNA
tccagcctgggcaatggaat

SEQ ID NO: 1337 - DNA, 20 bp, synthetic construct
  misc_feature 1..20: note = B2M gRNA target site sequence
  source 1..20: mol_type = other DNA
aataaaaaaataaaaaaata

SEQ ID NO: 1338 - DNA, 20 bp, synthetic construct
  misc_feature 1..20: note = B2M gRNA target site sequence
  source 1..20: mol_type = other DNA
aaaaaataaagaacatacct

SEQ ID NO: 1339 - DNA, 20 bp, synthetic construct
  misc_feature 1..20: note = B2M gRNA target site sequence
  source 1..20: mol_type = other DNA
aaaaataaagaacatacctt

SEQ ID NO: 1340 - DNA, 20 bp, synthetic construct
  misc_feature 1..20: note = B2M gRNA target site sequence
  source 1..20: mol_type = other DNA
ataccttgggttgatccact

SEQ ID NO: 1341 - DNA, 20 bp, synthetic construct
  misc_feature 1..20: note = B2M gRNA target site sequence
  source 1..20: mol_type = other DNA
taccttgggttgatccactt

SEQ ID NO: 1342 - DNA, 20 bp, synthetic construct
  misc_feature 1..20: note = B2M gRNA target site sequence
  source 1..20: mol_type = other DNA
gttgatccacttaggaacct

SEQ ID NO: 1343 - DNA, 20 bp, synthetic construct
  misc_feature 1..20: note = B2M gRNA target site sequence
  source 1..20: mol_type = other DNA
ataataacatctgccacgta

SEQ ID NO: 1344 - DNA, 20 bp, synthetic construct
  misc_feature 1..20: note = B2M gRNA target site sequence
  source 1..20: mol_type = other DNA
aataacatctgccacgtata

SEQ ID NO: 1345 - DNA, 20 bp, synthetic construct
  misc_feature 1..20: note = B2M gRNA target site sequence
  source 1..20: mol_type = other DNA
atagagcaattgctatgtcc

SEQ ID NO: 1346 - DNA, 20 bp, synthetic construct
  misc_feature 1..20: note = B2M gRNA target site sequence
  source 1..20: mol_type = other DNA
tagagcaattgctatgtccc

SEQ ID NO: 1347 - DNA, 20 bp, synthetic construct
  misc_feature 1..20: note = B2M gRNA target site sequence
  source 1..20: mol_type = other DNA
ctatgtcccaggcactctac

SEQ ID NO: 1348 - DNA, 20 bp, synthetic construct
  misc_feature 1..20: note = B2M gRNA target site sequence
  source 1..20: mol_type = other DNA
actctactagacacttcata

SEQ ID NO: 1349 - DNA, 20 bp, synthetic construct
  misc_feature 1..20: note = B2M gRNA target site sequence
  source 1..20: mol_type = other DNA
actagacacttcatacagtt

SEQ ID NO: 1350 - DNA, 20 bp, synthetic construct
  misc_feature 1..20: note = B2M gRNA target site sequence
  source 1..20: mol_type = other DNA
cttcatacagtttagaaaat

SEQ ID NO: 1351 - DNA, 20 bp, synthetic construct
  misc_feature 1..20: note = B2M gRNA target site sequence
  source 1..20: mol_type = other DNA
atacagtttagaaaatcaga

SEQ ID NO: 1352 - DNA, 20 bp, synthetic construct
  misc_feature 1..20: note = B2M gRNA target site sequence
  source 1..20: mol_type = other DNA
tacagtttagaaaatcagat

SEQ ID NO: 1353 - DNA, 20 bp, synthetic construct
  misc_feature 1..20: note = B2M gRNA target site sequence
  source 1..20: mol_type = other DNA
tttagaaaatcagatgggtg

SEQ ID NO: 1354 - DNA, 20 bp, synthetic construct
  misc_feature 1..20: note = B2M gRNA target site sequence
  source 1..20: mol_type = other DNA
aaatcagatgggtgtagatc

SEQ ID NO: 1355 - DNA, 20 bp, synthetic construct
  misc_feature 1..20: note = B2M gRNA target site sequence
  source 1..20: mol_type = other DNA
aatcagatgggtgtagatca

SEQ ID NO: 1356 - DNA, 20 bp, synthetic construct
  misc_feature 1..20: note = B2M gRNA target site sequence
  source 1..20: mol_type = other DNA
cagatgggtgtagatcaagg

SEQ ID NO: 1357 - DNA, 20 bp, synthetic construct
  misc_feature 1..20: note = B2M gRNA target site sequence
  source 1..20: mol_type = other DNA
agatgggtgtagatcaaggc

SEQ ID NO: 1358 - DNA, 20 bp, synthetic construct
  misc_feature 1..20: note = B2M gRNA target site sequence
  source 1..20: mol_type = other DNA
atgggtgtagatcaaggcag

SEQ ID NO: 1359 - DNA, 20 bp, synthetic construct
  misc_feature 1..20: note = B2M gRNA target site sequence
  source 1..20: mol_type = other DNA
ggtgtagatcaaggcaggag

SEQ ID NO: 1360 - DNA, 20 bp, synthetic construct
  misc_feature 1..20: note = B2M gRNA target site sequence
  source 1..20: mol_type = other DNA
gtgtagatcaaggcaggagc

SEQ ID NO: 1361 - DNA, 20 bp, synthetic construct
  misc_feature 1..20: note = B2M gRNA target site sequence
  source 1..20: mol_type = other DNA
aggcaggagcaggaaccaaa

SEQ ID NO: 1362 - DNA, 20 bp, synthetic construct
  misc_feature 1..20: note = B2M gRNA target site sequence
  source 1..20: mol_type = other DNA
aggagcaggaaccaaaaaga

SEQ ID NO: 1363 - DNA, 20 bp, synthetic construct
  misc_feature 1..20: note = B2M gRNA target site sequence
  source 1..20: mol_type = other DNA
ggagcaggaaccaaaaagaa

SEQ ID NO: 1364 - DNA, 20 bp, synthetic construct
  misc_feature 1..20: note = B2M gRNA target site sequence
  source 1..20: mol_type = other DNA
aaaaagaaaggcataaacat

SEQ ID NO: 1365 - DNA, 20 bp, synthetic construct
  misc_feature 1..20: note = B2M gRNA target site sequence
  source 1..20: mol_type = other DNA
cataaacataagaaaaaaaa

SEQ ID NO: 1366 - DNA, 20 bp, synthetic construct
  misc_feature 1..20: note = B2M gRNA target site sequence
  source 1..20: mol_type = other DNA
aaacataagaaaaaaaatgg

SEQ ID NO: 1367 - DNA, 20 bp, synthetic construct
  misc_feature 1..20: note = B2M gRNA target site sequence
  source 1..20: mol_type = other DNA
aacataagaaaaaaaatgga

SEQ ID NO: 1368 - DNA, 20 bp, synthetic construct
  misc_feature 1..20: note = B2M gRNA target site sequence
  source 1..20: mol_type = other DNA
acataagaaaaaaaatggaa

SEQ ID NO: 1369 - DNA, 20 bp, synthetic construct
  misc_feature 1..20: note = B2M gRNA target site sequence
  source 1..20: mol_type = other DNA
cataagaaaaaaaatggaag

SEQ ID NO: 1370 - DNA, 20 bp, synthetic construct
  misc_feature 1..20: note = B2M gRNA target site sequence
  source 1..20: mol_type = other DNA
aagaaaaaaaatggaagggg

SEQ ID NO: 1371 - DNA, 20 bp, synthetic construct
  misc_feature 1..20: note = B2M gRNA target site sequence
  source 1..20: mol_type = other DNA
aaaaatggaaggggtggaaa

SEQ ID NO: 1372 - DNA, 20 bp, synthetic construct
  misc_feature 1..20: note = B2M gRNA target site sequence
  source 1..20: mol_type = other DNA
aaatggaaggggtggaaaca

SEQ ID NO: 1373 - DNA, 20 bp, synthetic construct
  misc_feature 1..20: note = B2M gRNA target site sequence
  source 1..20: mol_type = other DNA
gaaacagagtacaataacat

SEQ ID NO: 1374 - DNA, 20 bp, synthetic construct
  misc_feature 1..20: note = B2M gRNA target site sequence
  source 1..20: mol_type = other DNA
caataacatgagtaatttga

SEQ ID NO: 1375 - DNA, 20 bp, synthetic construct
  misc_feature 1..20: note = B2M gRNA target site sequence
  source 1..20: mol_type = other DNA
aataacatgagtaatttgat

SEQ ID NO: 1376 - DNA, 20 bp, synthetic construct
  misc_feature 1..20: note = B2M gRNA target site sequence
  source 1..20: mol_type = other DNA
ataacatgagtaatttgatg

SEQ ID NO: 1377 - DNA, 20 bp, synthetic construct
  misc_feature 1..20: note = B2M gRNA target site sequence
  source 1..20: mol_type = other DNA
taacatgagtaatttgatgg

SEQ ID NO: 1378 - DNA, 20 bp, synthetic construct
  misc_feature 1..20: note = B2M gRNA target site sequence
  source 1..20: mol_type = other DNA
gatgggggctattatgaact

SEQ ID NO: 1379 - DNA, 20 bp, synthetic construct
  misc_feature 1..20: note = B2M gRNA target site sequence
  source 1..20: mol_type = other DNA
actgagaaatgaactttgaa

SEQ ID NO: 1380 - DNA, 20 bp, synthetic construct
  misc_feature 1..20: note = B2M gRNA target site sequence
  source 1..20: mol_type = other DNA
atgaactttgaaaagtatct

SEQ ID NO: 1381 - DNA, 20 bp, synthetic construct
  misc_feature 1..20: note = B2M gRNA target site sequence
  source 1..20: mol_type = other DNA
tgaactttgaaaagtatctt

SEQ ID NO: 1382 - DNA, 20 bp, synthetic construct
  misc_feature 1..20: note = B2M gRNA target site sequence
  source 1..20: mol_type = other DNA
gaactttgaaaagtatcttg

SEQ ID NO: 1383 - DNA, 20 bp, synthetic construct
  misc_feature 1..20: note = B2M gRNA target site sequence
  source 1..20: mol_type = other DNA
tatcttggggccaaatcatg

SEQ ID NO: 1384 - DNA, 20 bp, synthetic construct
  misc_feature 1..20: note = B2M gRNA target site sequence
  source 1..20: mol_type = other DNA
gccaaatcatgtagactctt

SEQ ID NO: 1385 - DNA, 20 bp, synthetic construct
  misc_feature 1..20: note = B2M gRNA target site sequence
  source 1..20: mol_type = other DNA
agactcttgagtgatgtgtt

SEQ ID NO: 1386 - DNA, 20 bp, synthetic construct
  misc_feature 1..20: note = B2M gRNA target site sequence
  source 1..20: mol_type = other DNA
gactcttgagtgatgtgtta

SEQ ID NO: 1387 - DNA, 20 bp, synthetic construct
  misc_feature 1..20: note = B2M gRNA target site sequence
  source 1..20: mol_type = other DNA
gatgtgttaaggaatgctat

SEQ ID NO: 1388 - DNA, 20 bp, synthetic construct
  misc_feature 1..20: note = B2M gRNA target site sequence
  source 1..20: mol_type = other DNA
taaggaatgctatgagtgct

SEQ ID NO: 1389 - DNA, 20 bp, synthetic construct
  misc_feature 1..20: note = B2M gRNA target site sequence
  source 1..20: mol_type = other DNA
aggaatgctatgagtgctga

SEQ ID NO: 1390 - DNA, 20 bp, synthetic construct
  misc_feature 1..20: note = B2M gRNA target site sequence
  source 1..20: mol_type = other DNA
ggaatgctatgagtgctgag

SEQ ID NO: 1391 - DNA, 20 bp, synthetic construct
  misc_feature 1..20: note = B2M gRNA target site sequence
  source 1..20: mol_type = other DNA
gaatgctatgagtgctgaga

SEQ ID NO: 1392 - DNA, 20 bp, synthetic construct
  misc_feature 1..20: note = B2M gRNA target site sequence
  source 1..20: mol_type = other DNA
tatgagtgctgagagggcat

SEQ ID NO: 1393 - DNA, 20 bp, synthetic construct
  misc_feature 1..20: note = B2M gRNA target site sequence
  source 1..20: mol_type = other DNA
gagtgctgagagggcatcag

SEQ ID NO: 1394 - DNA, 20 bp, synthetic construct
  misc_feature 1..20: note = B2M gRNA target site sequence
  source 1..20: mol_type = other DNA
agagggcatcagaagtcctt

SEQ ID NO: 1395 - DNA, 20 bp, synthetic construct
  misc_feature 1..20: note = B2M gRNA target site sequence
  source 1..20: mol_type = other DNA
agggcatcagaagtccttga

SEQ ID NO: 1396 - DNA, 20 bp, synthetic construct
  misc_feature 1..20: note = B2M gRNA target site sequence
  source 1..20: mol_type = other DNA
cagaagtccttgagagcctc

SEQ ID NO: 1397 - DNA, 20 bp, synthetic construct
  misc_feature 1..20: note = B2M gRNA target site sequence
  source 1..20: mol_type = other DNA
gaagtccttgagagcctcca

SEQ ID NO: 1398 - DNA, 20 bp, synthetic construct
  misc_feature 1..20: note = B2M gRNA target site sequence
  source 1..20: mol_type = other DNA
tccttgagagcctccagaga

SEQ ID NO: 1399 - DNA, 20 bp, synthetic construct
  misc_feature 1..20: note = B2M gRNA target site sequence
  source 1..20: mol_type = other DNA
ccttgagagcctccagagaa

SEQ ID NO: 1400 - DNA, 20 bp, synthetic construct
  misc_feature 1..20: note = B2M gRNA target site sequence
  source 1..20: mol_type = other DNA
gagaaaggctcttaaaaatg

SEQ ID NO: 1401 - DNA, 20 bp, synthetic construct
  misc_feature 1..20: note = B2M gRNA target site sequence
  source 1..20: mol_type = other DNA
taaaaatgcagcgcaatctc

SEQ ID NO: 1402 - DNA, 20 bp, synthetic construct
  misc_feature 1..20: note = B2M gRNA target site sequence
  source 1..20: mol_type = other DNA
tgcagcgcaatctccagtga

SEQ ID NO: 1403 - DNA, 20 bp, synthetic construct
  misc_feature 1..20: note = B2M gRNA target site sequence
  source 1..20: mol_type = other DNA
agcgcaatctccagtgacag

SEQ ID NO: 1404 - DNA, 20 bp, synthetic construct
  misc_feature 1..20: note = B2M gRNA target site sequence
  source 1..20: mol_type = other DNA
ccagtgacagaagatactgc

SEQ ID NO: 1405 - DNA, 20 bp, synthetic construct
  misc_feature 1..20: note = B2M gRNA target site sequence
  source 1..20: mol_type = other DNA
agatactgctagaaatctgc

SEQ ID NO: 1406 - DNA, 20 bp, synthetic construct
  misc_feature 1..20: note = B2M gRNA target site sequence
  source 1..20: mol_type = other DNA
ctgctagaaaaaaaacaaaa

SEQ ID NO: 1407 - DNA, 20 bp, synthetic construct
  misc_feature 1..20: note = B2M gRNA target site sequence
  source 1..20: mol_type = other DNA
tgctagaaaaaaaacaaaaa

SEQ ID NO: 1408 - DNA, 20 bp, synthetic construct
  misc_feature 1..20: note = B2M gRNA target site sequence
  source 1..20: mol_type = other DNA
aaaaacaaaaaaggcatgta

SEQ ID NO: 1409 - DNA, 20 bp, synthetic construct
  misc_feature 1..20: note = B2M gRNA target site sequence
  source 1..20: mol_type = other DNA
aaacaaaaaaggcatgtata

SEQ ID NO: 1410 - DNA, 20 bp, synthetic construct
  misc_feature 1..20: note = B2M gRNA target site sequence
  source 1..20: mol_type = other DNA
aacaaaaaaggcatgtatag

SEQ ID NO: 1411 - DNA, 20 bp, synthetic construct
  misc_feature 1..20: note = B2M gRNA target site sequence
  source 1..20: mol_type = other DNA
ggcatgtatagaggaattat

SEQ ID NO: 1412 - DNA, 20 bp, synthetic construct
  misc_feature 1..20: note = B2M gRNA target site sequence
  source 1..20: mol_type = other DNA
gcatgtatagaggaattatg

SEQ ID NO: 1413 - DNA, 20 bp, synthetic construct
  misc_feature 1..20: note = B2M gRNA target site sequence
  source 1..20: mol_type = other DNA
catgtatagaggaattatga

SEQ ID NO: 1414 - DNA, 20 bp, synthetic construct
  misc_feature 1..20: note = B2M gRNA target site sequence
  source 1..20: mol_type = other DNA
tatagaggaattatgaggga

SEQ ID NO: 1415 - DNA, 20 bp, synthetic construct
  misc_feature 1..20: note = B2M gRNA target site sequence
  source 1..20: mol_type = other DNA
aattatgagggaaagatacc

SEQ ID NO: 1416 - DNA, 20 bp, synthetic construct
  misc_feature 1..20: note = B2M gRNA target site sequence
  source 1..20: mol_type = other DNA
gagggaaagataccaagtca

SEQ ID NO: 1417 - DNA, 20 bp, synthetic construct
  misc_feature 1..20: note = B2M gRNA target site sequence
  source 1..20: mol_type = other DNA
tcacggtttattcttcaaaa

SEQ ID NO: 1418 - DNA, 20 bp, synthetic construct
  misc_feature 1..20: note = B2M gRNA target site sequence
  source 1..20: mol_type = other DNA
acggtttattcttcaaaatg

SEQ ID NO: 1419 - DNA, 20 bp, synthetic construct
  misc_feature 1..20: note = B2M gRNA target site sequence
  source 1..20: mol_type = other DNA
cggtttattcttcaaaatgg

SEQ ID NO: 1420 - DNA, 20 bp, synthetic construct
  misc_feature 1..20: note = B2M gRNA target site sequence
  source 1..20: mol_type = other DNA
tttattcttcaaaatggagg

SEQ ID NO: 1421 - DNA, 20 bp, synthetic construct
  misc_feature 1..20: note = B2M gRNA target site sequence
  source 1..20: mol_type = other DNA
tcaaaatggaggtggcttgt

SEQ ID NO: 1422 - DNA, 20 bp, synthetic construct
  misc_feature 1..20: note = B2M gRNA target site sequence
  source 1..20: mol_type = other DNA
caaaatggaggtggcttgtt

SEQ ID NO: 1423 - DNA, 20 bp, synthetic construct
  misc_feature 1..20: note = B2M gRNA target site sequence
  source 1..20: mol_type = other DNA
aatggaggtggcttgttggg

SEQ ID NO: 1424 - DNA, 20 bp, synthetic construct
  misc_feature 1..20: note = B2M gRNA target site sequence
  source 1..20: mol_type = other DNA
atggaggtggcttgttggga

SEQ ID NO: 1425 - DNA, 20 bp, synthetic construct
  misc_feature 1..20: note = B2M gRNA target site sequence
  source 1..20: mol_type = other DNA
gaggtggcttgttgggaagg

SEQ ID NO: 1426 - DNA, 20 bp, synthetic construct
  misc_feature 1..20: note = B2M gRNA target site sequence
  source 1..20: mol_type = other DNA
gtggcttgttgggaaggtgg

SEQ ID NO: 1427 - DNA, 20 bp, synthetic construct
  misc_feature 1..20: note = B2M gRNA target site sequence
  source 1..20: mol_type = other DNA
tgggaaggtggaagctcatt

SEQ ID NO: 1428 - DNA, 20 bp, synthetic construct
  misc_feature 1..20: note = B2M gRNA target site sequence
  source 1..20: mol_type = other DNA
aaggtggaagctcatttggc

SEQ ID NO: 1429 - DNA, 20 bp, synthetic construct
  misc_feature 1..20: note = B2M gRNA target site sequence
  source 1..20: mol_type = other DNA
ggtggaagctcatttggcca

SEQ ID NO: 1430 - DNA, 20 bp, synthetic construct
  misc_feature 1..20: note = B2M gRNA target site sequence
  source 1..20: mol_type = other DNA
ggaagctcatttggccagag

SEQ ID NO: 1431 - DNA, 20 bp, synthetic construct
  misc_feature 1..20: note = B2M gRNA target site sequence
  source 1..20: mol_type = other DNA
tcatttggccagagtggaaa

SEQ ID NO: 1432 - DNA, 20 bp, synthetic construct
  misc_feature 1..20: note = B2M gRNA target site sequence
  source 1..20: mol_type = other DNA
ggccagagtggaaatggaat

SEQ ID NO: 1433 - DNA, 20 bp, synthetic construct
  misc_feature 1..20: note = B2M gRNA target site sequence
  source 1..20: mol_type = other DNA
gccagagtggaaatggaatt

SEQ ID NO: 1434 - DNA, 20 bp, synthetic construct
  misc_feature 1..20: note = B2M gRNA target site sequence
  source 1..20: mol_type = other DNA
cagagtggaaatggaattgg

SEQ ID NO: 1435 - DNA, 20 bp, synthetic construct
  misc_feature 1..20: note = B2M gRNA target site sequence
  source 1..20: mol_type = other DNA
gatgaccaaatgtaaacact

SEQ ID NO: 1436 - DNA, 20 bp, synthetic construct
  misc_feature 1..20: note = B2M gRNA target site sequence
  source 1..20: mol_type = other DNA
taaacacttggtgcctgata

SEQ ID NO: 1437 - DNA, 20 bp, synthetic construct
  misc_feature 1..20: note = B2M gRNA target site sequence
  source 1..20: mol_type = other DNA
gcctgatatagcttgacacc

SEQ ID NO: 1438 - DNA, 20 bp, synthetic construct
  misc_feature 1..20: note = B2M gRNA target site sequence
  source 1..20: mol_type = other DNA
gatatagcttgacaccaagt

SEQ ID NO: 1439 - DNA, 20 bp, synthetic construct
  misc_feature 1..20: note = B2M gRNA target site sequence
  source 1..20: mol_type = other DNA
cttgacaccaagttagcccc

SEQ ID NO: 1440 - DNA, 20 bp, synthetic construct
  misc_feature 1..20: note = B2M gRNA target site sequence
  source 1..20: mol_type = other DNA
tagccccaagtgaaataccc

SEQ ID NO: 1441 - DNA, 20 bp, synthetic construct
  misc_feature 1..20: note = B2M gRNA target site sequence
  source 1..20: mol_type = other DNA
tgtcttttcccgatattcct

SEQ ID NO: 1442 - DNA, 20 bp, synthetic construct
  misc_feature 1..20: note = B2M gRNA target site sequence
  source 1..20: mol_type = other DNA
gtcttttcccgatattcctc

SEQ ID NO: 1443 - DNA, 20 bp, synthetic construct
  misc_feature 1..20: note = B2M gRNA target site sequence
  source 1..20: mol_type = other DNA
gatattcctcaggtactcca

SEQ ID NO: 1444 - DNA, 20 bp, synthetic construct
  misc_feature 1..20: note = B2M gRNA target site sequence
  source 1..20: mol_type = other DNA
cctcaggtactccaaagatt

SEQ ID NO: 1445 - DNA, 20 bp, synthetic construct
  misc_feature 1..20: note = B2M gRNA target site sequence
  source 1..20: mol_type = other DNA
ctcaggtactccaaagattc

SEQ ID NO: 1446 - DNA, 20 bp, synthetic construct
  misc_feature 1..20: note = B2M gRNA target site sequence
  source 1..20: mol_type = other DNA
tcaggtttactcacgtcatc

SEQ ID NO: 1447 - DNA, 20 bp, synthetic construct
  misc_feature 1..20: note = B2M gRNA target site sequence
  source 1..20: mol_type = other DNA
ggtttactcacgtcatccag

SEQ ID NO: 1448 - DNA, 20 bp, synthetic construct
  misc_feature 1..20: note = B2M gRNA target site sequence
  source 1..20: mol_type = other DNA
tttactcacgtcatccagca

SEQ ID NO: 1449 - DNA, 20 bp, synthetic construct
  misc_feature 1..20: note = B2M gRNA target site sequence
  source 1..20: mol_type = other DNA
tcacgtcatccagcagagaa

SEQ ID NO: 1450 - DNA, 20 bp, synthetic construct
  misc_feature 1..20: note = B2M gRNA target site sequence
  source 1..20: mol_type = other DNA
gtcatccagcagagaatgga

SEQ ID NO: 1451 - DNA, 20 bp, synthetic construct
  misc_feature 1..20: note = B2M gRNA target site sequence
  source 1..20: mol_type = other DNA
ttcctgaattgctatgtgtc

SEQ ID NO: 1452 - DNA, 20 bp, synthetic construct
  misc_feature 1..20: note = B2M gRNA target site sequence
  source 1..20: mol_type = other DNA
tcctgaattgctatgtgtct

SEQ ID NO: 1453 - DNA, 20 bp, synthetic construct
  misc_feature 1..20: note = B2M gRNA target site sequence
  source 1..20: mol_type = other DNA
gtttcatccatccgacattg

SEQ ID NO: 1454 - DNA, 20 bp, synthetic construct
  misc_feature 1..20: note = B2M gRNA target site sequence
  source 1..20: mol_type = other DNA
acattgaagttgacttactg

SEQ ID NO: 1455 - DNA, 20 bp, synthetic construct
  misc_feature 1..20: note = B2M gRNA target site sequence
  source 1..20: mol_type = other DNA
gaagttgacttactgaagaa

SEQ ID NO: 1456 - DNA, 20 bp, synthetic construct
  misc_feature 1..20: note = B2M gRNA target site sequence
  source 1..20: mol_type = other DNA
agttgacttactgaagaatg

SEQ ID NO: 1457 - DNA, 20 bp, synthetic construct
  misc_feature 1..20: note = B2M gRNA target site sequence
  source 1..20: mol_type = other DNA
ttgacttactgaagaatgga

SEQ ID NO: 1458 - DNA, 20 bp, synthetic construct
  misc_feature 1..20: note = B2M gRNA target site sequence
  source 1..20: mol_type = other DNA
gacttactgaagaatggaga

SEQ ID NO: 1459 - DNA, 20 bp, synthetic construct
  misc_feature 1..20: note = B2M gRNA target site sequence
  source 1..20: mol_type = other DNA
gaatggagagagaattgaaa

SEQ ID NO: 1460 - DNA, 20 bp, synthetic construct
  misc_feature 1..20: note = B2M gRNA target site sequence
  source 1..20: mol_type = other DNA
tggagagagaattgaaaaag

SEQ ID NO: 1461 - DNA, 20 bp, synthetic construct
  misc_feature 1..20: note = B2M gRNA target site sequence
  source 1..20: mol_type = other DNA
gagagagaattgaaaaagtg

SEQ ID NO: 1462 - DNA, 20 bp, synthetic construct
  misc_feature 1..20: note = B2M gRNA target site sequence
  source 1..20: mol_type = other DNA
aattgaaaaagtggagcatt

SEQ ID NO: 1463 - DNA, 20 bp, synthetic construct
  misc_feature 1..20: note = B2M gRNA target site sequence
  source 1..20: mol_type = other DNA
gagcattcagacttgtcttt

SEQ ID NO: 1464 - DNA, 20 bp, synthetic construct
  misc_feature 1..20: note = B2M gRNA target site sequence
  source 1..20: mol_type = other DNA
attcagacttgtctttcagc

SEQ ID NO: 1465 - DNA, 20 bp, synthetic construct
  misc_feature 1..20: note = B2M gRNA target site sequence
  source 1..20: mol_type = other DNA
ttcagacttgtctttcagca

SEQ ID NO: 1466 - DNA, 20 bp, synthetic construct
  misc_feature 1..20: note = B2M gRNA target site sequence
  source 1..20: mol_type = other DNA
acttgtctttcagcaaggac

SEQ ID NO: 1467 - DNA, 20 bp, synthetic construct
  misc_feature 1..20: note = B2M gRNA target site sequence
  source 1..20: mol_type = other DNA
tgaattcacccccactgaaa

SEQ ID NO: 1468 - DNA, 20 bp, synthetic construct
  misc_feature 1..20: note = B2M gRNA target site sequence
  source 1..20: mol_type = other DNA
tcacccccactgaaaaagat

SEQ ID NO: 1469 - DNA, 20 bp, synthetic construct
  misc_feature 1..20: note = B2M gRNA target site sequence
  source 1..20: mol_type = other DNA
tgaaccatgtgactttgtca

SEQ ID NO: 1470 - DNA, 20 bp, synthetic construct
  misc_feature 1..20: note = B2M gRNA target site sequence
  source 1..20: mol_type = other DNA
atgtgactttgtcacagccc

SEQ ID NO: 1471 - DNA, 20 bp, synthetic construct
  misc_feature 1..20: note = B2M gRNA target site sequence
  source 1..20: mol_type = other DNA
gactttgtcacagcccaaga

SEQ ID NO: 1472 - DNA, 20 bp, synthetic construct
  misc_feature 1..20: note = B2M gRNA target site sequence
  source 1..20: mol_type = other DNA
tgtcacagcccaagatagtt

SEQ ID NO: 1473 - DNA, 20 bp, synthetic construct
  misc_feature 1..20: note = B2M gRNA target site sequence
  source 1..20: mol_type = other DNA
cacagcccaagatagttaag

SEQ ID NO: 1474 - DNA, 20 bp, synthetic construct
  misc_feature 1..20: note = B2M gRNA target site sequence
  source 1..20: mol_type = other DNA
acagcccaagatagttaagt

SEQ ID NO: 1475 - DNA, 20 bp, synthetic construct
  misc_feature 1..20: note = B2M gRNA target site sequence
  source 1..20: mol_type = other DNA
cagcccaagatagttaagtg

SEQ ID NO: 1476 - DNA, 20 bp, synthetic construct
  misc_feature 1..20: note = B2M gRNA target site sequence
  source 1..20: mol_type = other DNA
ccaagatagttaagtggggt

SEQ ID NO: 1477 - DNA, 20 bp, synthetic construct
  misc_feature 1..20: note = B2M gRNA target site sequence
  source 1..20: mol_type = other DNA
taagtcttacattcttttgt

SEQ ID NO: 1478 - DNA, 20 bp, synthetic construct
  misc_feature 1..20: note = B2M gRNA target site sequence
  source 1..20: mol_type = other DNA
attcttttgtaagctgctga

SEQ ID NO: 1479 - DNA, 20 bp, synthetic construct
  misc_feature 1..20: note = B2M gRNA target site sequence
  source 1..20: mol_type = other DNA
agctgctgaaagttgtgtat

SEQ ID NO: 1480 - DNA, 20 bp, synthetic construct
  misc_feature 1..20: note = B2M gRNA target site sequence
  source 1..20: mol_type = other DNA
tgctgaaagttgtgtatgag

SEQ ID NO: 1481 - DNA, 20 bp, synthetic construct
  misc_feature 1..20: note = B2M gRNA target site sequence
  source 1..20: mol_type = other DNA
gtatgagtagtcatatcata

SEQ ID NO: 1482 - DNA, 20 bp, synthetic construct
  misc_feature 1..20: note = B2M gRNA target site sequence
  source 1..20: mol_type = other DNA
aaagctgctttgatataaaa

SEQ ID NO: 1483 - DNA, 20 bp, synthetic construct
  misc_feature 1..20: note = B2M gRNA target site sequence
  source 1..20: mol_type = other DNA
aagctgctttgatataaaaa

SEQ ID NO: 1484 - DNA, 20 bp, synthetic construct
  misc_feature 1..20: note = B2M gRNA target site sequence
  source 1..20: mol_type = other DNA
tttgatataaaaaaggtcta

SEQ ID NO: 1485 - DNA, 20 bp, synthetic construct
  misc_feature 1..20: note = B2M gRNA target site sequence
  source 1..20: mol_type = other DNA
atggccatactaccctgaat

SEQ ID NO: 1486 - DNA, 20 bp, synthetic construct
  misc_feature 1..20: note = B2M gRNA target site sequence
  source 1..20: mol_type = other DNA
gatataaacaatctgcatat

SEQ ID NO: 1487 - DNA, 20 bp, synthetic construct
  misc_feature 1..20: note = B2M gRNA target site sequence
  source 1..20: mol_type = other DNA
atataaacaatctgcatatt

SEQ ID NO: 1488 - DNA, 20 bp, synthetic construct
  misc_feature 1..20: note = B2M gRNA target site sequence
  source 1..20: mol_type = other DNA
aatctgcatattgggattgt

SEQ ID NO: 1489 - DNA, 20 bp, synthetic construct
  misc_feature 1..20: note = B2M gRNA target site sequence
  source 1..20: mol_type = other DNA
atctgcatattgggattgtc

SEQ ID NO: 1490 - DNA, 20 bp, synthetic construct
  misc_feature 1..20: note = B2M gRNA target site sequence
  source 1..20: mol_type = other DNA
tctgcatattgggattgtca

SEQ ID NO: 1491 - DNA, 20 bp, synthetic construct
  misc_feature 1..20: note = B2M gRNA target site sequence
  source 1..20: mol_type = other DNA
attgtcagggaatgttctta

SEQ ID NO: 1492 - DNA, 20 bp, synthetic construct
  misc_feature 1..20: note = B2M gRNA target site sequence
  source 1..20: mol_type = other DNA
cagggaatgttcttaaagat

SEQ ID NO: 1493 - DNA, 20 bp, synthetic construct
  misc_feature 1..20: note = B2M gRNA target site sequence
  source 1..20: mol_type = other DNA
aatgttcttaaagatcagat

SEQ ID NO: 1494 - DNA, 20 bp, synthetic construct
  misc_feature 1..20: note = B2M gRNA target site sequence
  source 1..20: mol_type = other DNA
gttcttaaagatcagattag

SEQ ID NO: 1495 - DNA, 20 bp, synthetic construct
  misc_feature 1..20: note = B2M gRNA target site sequence
  source 1..20: mol_type = other DNA
tcagattagtggcacctgct

SEQ ID NO: 1496 - DNA, 20 bp, synthetic construct
  misc_feature 1..20: note = B2M gRNA target site sequence
  source 1..20: mol_type = other DNA
cctgctgagatactgatgca

SEQ ID NO: 1497 - DNA, 20 bp, synthetic construct
  misc_feature 1..20: note = B2M gRNA target site sequence
  source 1..20: mol_type = other DNA
tgagatactgatgcacagca

SEQ ID NO: 1498 - DNA, 20 bp, synthetic construct
  misc_feature 1..20: note = B2M gRNA target site sequence
  source 1..20: mol_type = other DNA
gcacagcatggtttctgaac

SEQ ID NO: 1499 - DNA, 20 bp, synthetic construct
  misc_feature 1..20: note = B2M gRNA target site sequence
  source 1..20: mol_type = other DNA
cagcatggtttctgaaccag

SEQ ID NO: 1500 - DNA, 20 bp, synthetic construct
  misc_feature 1..20: note = B2M gRNA target site sequence
  source 1..20: mol_type = other DNA
ctgaaccagtagtttccctg

SEQ ID NO: 1501 - DNA, 20 bp, synthetic construct
  misc_feature 1..20: note = B2M gRNA target site sequence
  source 1..20: mol_type = other DNA
ccagtagtttccctgcagtt

SEQ ID NO: 1502 - DNA, 20 bp, synthetic construct
  misc_feature 1..20: note = B2M gRNA target site sequence
  source 1..20: mol_type = other DNA
gtagtttccctgcagttgag

SEQ ID NO: 1503 - DNA, 20 bp, synthetic construct
  misc_feature 1..20: note = B2M gRNA target site sequence
  source 1..20: mol_type = other DNA
tagtttccctgcagttgagc

SEQ ID NO: 1504 - DNA, 20 bp, synthetic construct
  misc_feature 1..20: note = B2M gRNA target site sequence
  source 1..20: mol_type = other DNA
agtttccctgcagttgagca

SEQ ID NO: 1505 - DNA, 20 bp, synthetic construct
  misc_feature 1..20: note = B2M gRNA target site sequence
  source 1..20: mol_type = other DNA
tttccctgcagttgagcagg

SEQ ID NO: 1506 - DNA, 20 bp, synthetic construct
  misc_feature 1..20: note = B2M gRNA target site sequence
  source 1..20: mol_type = other DNA
ccctgcagttgagcagggag

SEQ ID NO: 1507 - DNA, 20 bp, synthetic construct
  misc_feature 1..20: note = B2M gRNA target site sequence
  source 1..20: mol_type = other DNA
tgcagttgagcagggagcag

SEQ ID NO: 1508 - DNA, 20 bp, synthetic construct
  misc_feature 1..20: note = B2M gRNA target site sequence
  source 1..20: mol_type = other DNA
agttgagcagggagcagcag

SEQ ID NO: 1509 - DNA, 20 bp, synthetic construct
  misc_feature 1..20: note = B2M gRNA target site sequence
  source 1..20: mol_type = other DNA
tcttaacacttcttacctac

SEQ ID NO: 1510 - DNA, 20 bp, synthetic construct
  misc_feature 1..20: note = B2M gRNA target site sequence
  source 1..20: mol_type = other DNA
tcttacctactggcttcctc

SEQ ID NO: 1511 - DNA, 20 bp, synthetic construct
  misc_feature 1..20: note = B2M gRNA target site sequence
  source 1..20: mol_type = other DNA
ctggcttcctctagcttttg

SEQ ID NO: 1512 - DNA, 20 bp, synthetic construct
  misc_feature 1..20: note = B2M gRNA target site sequence
  source 1..20: mol_type = other DNA
gcttcctctagcttttgtgg

SEQ ID NO: 1513 - DNA, 20 bp, synthetic construct
  misc_feature 1..20: note = B2M gRNA target site sequence
  source 1..20: mol_type = other DNA
tctagcttttgtggcagctt

SEQ ID NO: 1514 - DNA, 20 bp, synthetic construct
  misc_feature 1..20: note = B2M gRNA target site sequence
  source 1..20: mol_type = other DNA
ctagcttttgtggcagcttc

SEQ ID NO: 1515 - DNA, 20 bp, synthetic construct
  misc_feature 1..20: note = B2M gRNA target site sequence
  source 1..20: mol_type = other DNA
gtggcagcttcaggtatatt

SEQ ID NO: 1516 - DNA, 20 bp, synthetic construct
  misc_feature 1..20: note = B2M gRNA target site sequence
  source 1..20: mol_type = other DNA
tagcactgaacgaacatctc

SEQ ID NO: 1517 - DNA, 20 bp, synthetic construct
  misc_feature 1..20: note = B2M gRNA target site sequence
  source 1..20: mol_type = other DNA
cactgaacgaacatctcaag

SEQ ID NO: 1518 - DNA, 20 bp, synthetic construct
  misc_feature 1..20: note = B2M gRNA target site sequence
  source 1..20: mol_type = other DNA
actgaacgaacatctcaaga

SEQ ID NO: 1519 - DNA, 20 bp, synthetic construct
  misc_feature 1..20: note = B2M gRNA target site sequence
  source 1..20: mol_type = other DNA
acgaacatctcaagaaggta

SEQ ID NO: 1520 - DNA, 20 bp, synthetic construct
  misc_feature 1..20: note = B2M gRNA target site sequence
  source 1..20: mol_type = other DNA
cgaacatctcaagaaggtat

SEQ ID NO: 1521 - DNA, 20 bp, synthetic construct
  misc_feature 1..20: note = B2M gRNA target site sequence
  source 1..20: mol_type = other DNA
aggtataggcctttgtttgt

SEQ ID NO: 1522 - DNA, 20 bp, synthetic construct
  misc_feature 1..20: note = B2M gRNA target site sequence
  source 1..20: mol_type = other DNA
gtttgtaagtcctgctgtcc

SEQ ID NO: 1523 - DNA, 20 bp, synthetic construct
  misc_feature 1..20: note = B2M gRNA target site sequence
  source 1..20: mol_type = other DNA
gtcctagcatcctataatcc

SEQ ID NO: 1524 - DNA, 20 bp, synthetic construct
  misc_feature 1..20: note = B2M gRNA target site sequence
  source 1..20: mol_type = other DNA
cctataatcctggacttctc

SEQ ID NO: 1525 - DNA, 20 bp, synthetic construct
  misc_feature 1..20: note = B2M gRNA target site sequence
  source 1..20: mol_type = other DNA
tggacttctccagtactttc

SEQ ID NO: 1526 - DNA, 20 bp, synthetic construct
  misc_feature 1..20: note = B2M gRNA target site sequence
  source 1..20: mol_type = other DNA
cttctccagtactttctggc

SEQ ID NO: 1527 - DNA, 20 bp, synthetic construct
  misc_feature 1..20: note = B2M gRNA target site sequence
  source 1..20: mol_type = other DNA
ccagtactttctggctggat

SEQ ID NO: 1528 - DNA, 20 bp, synthetic construct
  misc_feature 1..20: note = B2M gRNA target site sequence
  source 1..20: mol_type = other DNA
ttctggctggattggtatct

SEQ ID NO: 1529 - DNA, 20 bp, synthetic construct
  misc_feature 1..20: note = B2M gRNA target site sequence
  source 1..20: mol_type = other DNA
tctggctggattggtatctg

SEQ ID NO: 1530 - DNA, 20 bp, synthetic construct
  misc_feature 1..20: note = B2M gRNA target site sequence
  source 1..20: mol_type = other DNA
gctggattggtatctgaggc

SEQ ID NO: 1531 - DNA, 20 bp, synthetic construct
  misc_feature 1..20: note = B2M gRNA target site sequence
  source 1..20: mol_type = other DNA
ggattggtatctgaggctag

SEQ ID NO: 1532 - DNA, 20 bp, synthetic construct
  misc_feature 1..20: note = B2M gRNA target site sequence
  source 1..20: mol_type = other DNA
gattggtatctgaggctagt

SEQ ID NO: 1533 - DNA, 20 bp, synthetic construct
  misc_feature 1..20: note = B2M gRNA target site sequence
  source 1..20: mol_type = other DNA
tggtatctgaggctagtagg

SEQ ID NO: 1534 - DNA, 20 bp, synthetic construct
  misc_feature 1..20: note = B2M gRNA target site sequence
  source 1..20: mol_type = other DNA
ggtatctgaggctagtagga

SEQ ID NO: 1535 - DNA, 20 bp, synthetic construct
  misc_feature 1..20: note = B2M gRNA target site sequence
  source 1..20: mol_type = other DNA
gtatctgaggctagtaggaa

SEQ ID NO: 1536 - DNA, 20 bp, synthetic construct
  misc_feature 1..20: note = B2M gRNA target site sequence
  source 1..20: mol_type = other DNA
taggaagggcttgttcctgc

SEQ ID NO: 1537 - DNA, 20 bp, synthetic construct
  misc_feature 1..20: note = B2M gRNA target site sequence
  source 1..20: mol_type = other DNA
aggaagggcttgttcctgct

SEQ ID NO: 1538 - DNA, 20 bp, synthetic construct
  misc_feature 1..20: note = B2M gRNA target site sequence
  source 1..20: mol_type = other DNA
aagggcttgttcctgctggg

SEQ ID NO: 1539 - DNA, 20 bp, synthetic construct
  misc_feature 1..20: note = B2M gRNA target site sequence
  source 1..20: mol_type = other DNA
agctctaaacaatgtattca

SEQ ID NO: 1540 - DNA, 20 bp, synthetic construct
  misc_feature 1..20: note = B2M gRNA target site sequence
  source 1..20: mol_type = other DNA
gctctaaacaatgtattcat

SEQ ID NO: 1541 - DNA, 20 bp, synthetic construct
  misc_feature 1..20: note = B2M gRNA target site sequence
  source 1..20: mol_type = other DNA
ctaaacaatgtattcatggg

SEQ ID NO: 1542 - DNA, 20 bp, synthetic construct
  misc_feature 1..20: note = B2M gRNA target site sequence
  source 1..20: mol_type = other DNA
taaacaatgtattcatgggt

SEQ ID NO: 1543 - DNA, 20 bp, synthetic construct
  misc_feature 1..20: note = B2M gRNA target site sequence
  source 1..20: mol_type = other DNA
aatgtattcatgggtaggaa

SEQ ID NO: 1544 - DNA, 20 bp, synthetic construct
  misc_feature 1..20: note = B2M gRNA target site sequence
  source 1..20: mol_type = other DNA
gtattcatgggtaggaacag

SEQ ID NO: 1545 - DNA, 20 bp, synthetic construct
  misc_feature 1..20: note = B2M gRNA target site sequence
  source 1..20: mol_type = other DNA
ggaacagcagcctattctgc

SEQ ID NO: 1546 - DNA, 20 bp, synthetic construct
  misc_feature 1..20: note = B2M gRNA target site sequence
  source 1..20: mol_type = other DNA
agccttatttctaaccattt

SEQ ID NO: 1547 - DNA, 20 bp, synthetic construct
  misc_feature 1..20: note = B2M gRNA target site sequence
  source 1..20: mol_type = other DNA
taaccattttagacatttgt

SEQ ID NO: 1548 - DNA, 20 bp, synthetic construct
  misc_feature 1..20: note = B2M gRNA target site sequence
  source 1..20: mol_type = other DNA
tttagacatttgttagtaca

SEQ ID NO: 1549 - DNA, 20 bp, synthetic construct
  misc_feature 1..20: note = B2M gRNA target site sequence
  source 1..20: mol_type = other DNA
gttagtacatggtattttaa

SEQ ID NO: 1550 - DNA, 20 bp, synthetic construct
  misc_feature 1..20: note = B2M gRNA target site sequence
  source 1..20: mol_type = other DNA
tttctccactgtctttttca

SEQ ID NO: 1551 - DNA, 20 bp, synthetic construct
  misc_feature 1..20: note = B2M gRNA target site sequence
  source 1..20: mol_type = other DNA
cactgtctttttcatagatc

SEQ ID NO: 1552 - DNA, 20 bp, synthetic construct
  misc_feature 1..20: note = B2M gRNA target site sequence
  source 1..20: mol_type = other DNA
tttcatagatcgagacatgt

SEQ ID NO: 1553 - DNA, 20 bp, synthetic construct
  misc_feature 1..20: note = B2M gRNA target site sequence
  source 1..20: mol_type = other DNA
catagatcgagacatgtaag

SEQ ID NO: 1554 - DNA, 20 bp, synthetic construct
  misc_feature 1..20: note = B2M gRNA target site sequence
  source 1..20: mol_type = other DNA
gagacatgtaagcagcatca

SEQ ID NO: 1555 - DNA, 20 bp, synthetic construct
  misc_feature 1..20: note = B2M gRNA target site sequence
  source 1..20: mol_type = other DNA
gacatgtaagcagcatcatg

SEQ ID NO: 1556 - DNA, 20 bp, synthetic construct
  misc_feature 1..20: note = B2M gRNA target site sequence
  source 1..20: mol_type = other DNA
acatgtaagcagcatcatgg

SEQ ID NO: 1557 - DNA, 20 bp, synthetic construct
  misc_feature 1..20: note = B2M gRNA target site sequence
  source 1..20: mol_type = other DNA
gtaagcagcatcatggaggt

SEQ ID NO: 1558 - DNA, 20 bp, synthetic construct
  misc_feature 1..20: note = B2M gRNA target site sequence
  source 1..20: mol_type = other DNA
ggaggtaagtttttgacctt

SEQ ID NO: 1559 - DNA, 20 bp, synthetic construct
  misc_feature 1..20: note = B2M gRNA target site sequence
  source 1..20: mol_type = other DNA
tgtttttgtttcactgtcct

SEQ ID NO: 1560 - DNA, 20 bp, synthetic construct
  misc_feature 1..20: note = B2M gRNA target site sequence
  source 1..20: mol_type = other DNA
gtttttgtttcactgtcctg

SEQ ID NO: 1561 - DNA, 20 bp, synthetic construct
  misc_feature 1..20: note = B2M gRNA target site sequence
  source 1..20: mol_type = other DNA
actgtcctgaggactattta

SEQ ID NO: 1562 - DNA, 20 bp, synthetic construct
  misc_feature 1..20: note = B2M gRNA target site sequence
  source 1..20: mol_type = other DNA
tcctgaggactatttataga

SEQ ID NO: 1563 - DNA, 20 bp, synthetic construct
  misc_feature 1..20: note = B2M gRNA target site sequence
  source 1..20: mol_type = other DNA
acatgataaccctcactatg

SEQ ID NO: 1564 - DNA, 20 bp, synthetic construct
  misc_feature 1..20: note = B2M gRNA target site sequence
  source 1..20: mol_type = other DNA
atgataaccctcactatgtg

SEQ ID NO: 1565 - DNA, 20 bp, synthetic construct
  misc_feature 1..20: note = B2M gRNA target site sequence
  source 1..20: mol_type = other DNA
cactatgtggagaacattga

SEQ ID NO: 1566 - DNA, 20 bp, synthetic construct
  misc_feature 1..20: note = B2M gRNA target site sequence
  source 1..20: mol_type = other DNA
ctatgtggagaacattgaca

SEQ ID NO: 1567 - DNA, 20 bp, synthetic construct
  misc_feature 1..20: note = B2M gRNA target site sequence
  source 1..20: mol_type = other DNA
acattgacagagtaacattt

SEQ ID NO: 1568 - DNA, 20 bp, synthetic construct
  misc_feature 1..20: note = B2M gRNA target site sequence
  source 1..20: mol_type = other DNA
ttgacagagtaacattttag

SEQ ID NO: 1569 - DNA, 20 bp, synthetic construct
  misc_feature 1..20: note = B2M gRNA target site sequence
  source 1..20: mol_type = other DNA
tgacagagtaacattttagc

SEQ ID NO: 1570 - DNA, 20 bp, synthetic construct
  misc_feature 1..20: note = B2M gRNA target site sequence
  source 1..20: mol_type = other DNA
gacagagtaacattttagca

SEQ ID NO: 1571 - DNA, 20 bp, synthetic construct
  misc_feature 1..20: note = B2M gRNA target site sequence
  source 1..20: mol_type = other DNA
gagtaacattttagcaggga

SEQ ID NO: 1572 - DNA, 20 bp, synthetic construct
  misc_feature 1..20: note = B2M gRNA target site sequence
  source 1..20: mol_type = other DNA
taacattttagcagggaaag

SEQ ID NO: 1573 - DNA, 20 bp, synthetic construct
  misc_feature 1..20: note = B2M gRNA target site sequence
  source 1..20: mol_type = other DNA
gcagggaaagaagaatccta

SEQ ID NO: 1574 - DNA, 20 bp, synthetic construct
  misc_feature 1..20: note = B2M gRNA target site sequence
  source 1..20: mol_type = other DNA
cagggaaagaagaatcctac

SEQ ID NO: 1575 - DNA, 20 bp, synthetic construct
  misc_feature 1..20: note = B2M gRNA target site sequence
  source 1..20: mol_type = other DNA
agggaaagaagaatcctaca

SEQ ID NO: 1576 - DNA, 20 bp, synthetic construct
  misc_feature 1..20: note = B2M gRNA target site sequence
  source 1..20: mol_type = other DNA
ggtcatgttcccttctcctg

SEQ ID NO: 1577 - DNA, 20 bp, synthetic construct
  misc_feature 1..20: note = B2M gRNA target site sequence
  source 1..20: mol_type = other DNA
tcatgttcccttctcctgtg

SEQ ID NO: 1578 - DNA, 20 bp, synthetic construct
  misc_feature 1..20: note = B2M gRNA target site sequence
  source 1..20: mol_type = other DNA
tgttcccttctcctgtggag

SEQ ID NO: 1579 - DNA, 20 bp, synthetic construct
  misc_feature 1..20: note = B2M gRNA target site sequence
  source 1..20: mol_type = other DNA
ttctcctgtggagtggcatg

SEQ ID NO: 1580 - DNA, 20 bp, synthetic construct
  misc_feature 1..20: note = B2M gRNA target site sequence
  source 1..20: mol_type = other DNA
tcctgtggagtggcatgaag

SEQ ID NO: 1581 - DNA, 20 bp, synthetic construct
  misc_feature 1..20: note = B2M gRNA target site sequence
  source 1..20: mol_type = other DNA
cctgtggagtggcatgaaga

SEQ ID NO: 1582 - DNA, 20 bp, synthetic construct
  misc_feature 1..20: note = B2M gRNA target site sequence
  source 1..20: mol_type = other DNA
agtggcatgaagaaggtgta

SEQ ID NO: 1583 - DNA, 20 bp, synthetic construct
  misc_feature 1..20: note = B2M gRNA target site sequence
  source 1..20: mol_type = other DNA
atgaagaaggtgtatggccc

SEQ ID NO: 1584 - DNA, 20 bp, synthetic construct
  misc_feature 1..20: note = B2M gRNA target site sequence
  source 1..20: mol_type = other DNA
tgaagaaggtgtatggcccc

SEQ ID NO: 1585 - DNA, 20 bp, synthetic construct
  misc_feature 1..20: note = B2M gRNA target site sequence
  source 1..20: mol_type = other DNA
aaggtgtatggccccaggta

SEQ ID NO: 1586 - DNA, 20 bp, synthetic construct
  misc_feature 1..20: note = B2M gRNA target site sequence
  source 1..20: mol_type = other DNA
gccatattactgaccctcta

SEQ ID NO: 1587 - DNA, 20 bp, synthetic construct
  misc_feature 1..20: note = B2M gRNA target site sequence
  source 1..20: mol_type = other DNA
catattactgaccctctaca

SEQ ID NO: 1588 - DNA, 20 bp, synthetic construct
  misc_feature 1..20: note = B2M gRNA target site sequence
  source 1..20: mol_type = other DNA
tattactgaccctctacaga

SEQ ID NO: 1589 - DNA, 20 bp, synthetic construct
  misc_feature 1..20: note = B2M gRNA target site sequence
  source 1..20: mol_type = other DNA
attactgaccctctacagag

SEQ ID NO: 1590 - DNA, 20 bp, synthetic construct
  misc_feature 1..20: note = B2M gRNA target site sequence
  source 1..20: mol_type = other DNA
ttactgaccctctacagaga

SEQ ID NO: 1591 - DNA, 20 bp, synthetic construct
  misc_feature 1..20: note = B2M gRNA target site sequence
  source 1..20: mol_type = other DNA
gaccctctacagagagggca

SEQ ID NO: 1592 - DNA, 20 bp, synthetic construct
  misc_feature 1..20: note = B2M gRNA target site sequence
  source 1..20: mol_type = other DNA
accctctacagagagggcaa

SEQ ID NO: 1593 - DNA, 20 bp, synthetic construct
  misc_feature 1..20: note = B2M gRNA target site sequence
  source 1..20: mol_type = other DNA
agagagggcaaaggaactgc

SEQ ID NO: 1594 - DNA, 20 bp, synthetic construct
  misc_feature 1..20: note = B2M gRNA target site sequence
  source 1..20: mol_type = other DNA
gggcaaaggaactgccagta

SEQ ID NO: 1595 - DNA, 20 bp, synthetic construct
  misc_feature 1..20: note = B2M gRNA target site sequence
  source 1..20: mol_type = other DNA
gaactgccagtatggtattg

SEQ ID NO: 1596 - DNA, 20 bp, synthetic construct
  misc_feature 1..20: note = B2M gRNA target site sequence
  source 1..20: mol_type = other DNA
aactgccagtatggtattgc

SEQ ID NO: 1597 - DNA, 20 bp, synthetic construct
  misc_feature 1..20: note = B2M gRNA target site sequence
  source 1..20: mol_type = other DNA
cagtatggtattgcaggata

SEQ ID NO: 1598 - DNA, 20 bp, synthetic construct
  misc_feature 1..20: note = B2M gRNA target site sequence
  source 1..20: mol_type = other DNA
agtatggtattgcaggataa

SEQ ID NO: 1599 - DNA, 20 bp, synthetic construct
  misc_feature 1..20: note = B2M gRNA target site sequence
  source 1..20: mol_type = other DNA
atggtattgcaggataaagg

SEQ ID NO: 1600 - DNA, 20 bp, synthetic construct
  misc_feature 1..20: note = B2M gRNA target site sequence
  source 1..20: mol_type = other DNA
tggtattgcaggataaaggc

SEQ ID NO: 1601 - DNA, 20 bp, synthetic construct
  misc_feature 1..20: note = B2M gRNA target site sequence
  source 1..20: mol_type = other DNA
tattgcaggataaaggcagg

SEQ ID NO: 1602 - DNA, 20 bp, synthetic construct
  misc_feature 1..20: note = B2M gRNA target site sequence
  source 1..20: mol_type = other DNA
tggttacccacattacctgc

SEQ ID NO: 1603 - DNA, 20 bp, synthetic construct
  misc_feature 1..20: note = B2M gRNA target site sequence
  source 1..20: mol_type = other DNA
ggttacccacattacctgca

SEQ ID NO: 1604 - DNA, 20 bp, synthetic construct
  misc_feature 1..20: note = B2M gRNA target site sequence
  source 1..20: mol_type = other DNA
ttcttctgccatttccacat

SEQ ID NO: 1605 - DNA, 20 bp, synthetic construct
  misc_feature 1..20: note = B2M gRNA target site sequence
  source 1..20: mol_type = other DNA
ccacattggacatctctgct

SEQ ID NO: 1606 - DNA, 20 bp, synthetic construct
  misc_feature 1..20: note = B2M gRNA target site sequence
  source 1..20: mol_type = other DNA
cacattggacatctctgctg

SEQ ID NO: 1607 - DNA, 20 bp, synthetic construct
  misc_feature 1..20: note = B2M gRNA target site sequence
  source 1..20: mol_type = other DNA
cattggacatctctgctgag

SEQ ID NO: 1608 - DNA, 20 bp, synthetic construct
  misc_feature 1..20: note = B2M gRNA target site sequence
  source 1..20: mol_type = other DNA
ttggacatctctgctgagga

SEQ ID NO: 1609 - DNA, 20 bp, synthetic construct
  misc_feature 1..20: note = B2M gRNA target site sequence
  source 1..20: mol_type = other DNA
tataatgttgttttattctt

SEQ ID NO: 1610 - DNA, 20 bp, synthetic construct
  misc_feature 1..20: note = B2M gRNA target site sequence
  source 1..20: mol_type = other DNA
atgttgttttattcttcaga

SEQ ID NO: 1611 - DNA, 20 bp, synthetic construct
  misc_feature 1..20: note = B2M gRNA target site sequence
  source 1..20: mol_type = other DNA
ttgttttattcttcagacag

SEQ ID NO: 1612 - DNA, 20 bp, synthetic construct
  misc_feature 1..20: note = B2M gRNA target site sequence
  source 1..20: mol_type = other DNA
gttttattcttcagacagaa

SEQ ID NO: 1613 - DNA, 20 bp, synthetic construct
  misc_feature 1..20: note = B2M gRNA target site sequence
  source 1..20: mol_type = other DNA
tttattcttcagacagaaga

SEQ ID NO: 1614 - DNA, 20 bp, synthetic construct
  misc_feature 1..20: note = B2M gRNA target site sequence
  source 1..20: mol_type = other DNA
ttattcttcagacagaagag

SEQ ID NO: 1615 - DNA, 20 bp, synthetic construct
  misc_feature 1..20: note = B2M gRNA target site sequence
  source 1..20: mol_type = other DNA
attcttcagacagaagagag

SEQ ID NO: 1616 - DNA, 20 bp, synthetic construct
  misc_feature 1..20: note = B2M gRNA target site sequence
  source 1..20: mol_type = other DNA
gacagaagagaggagttata

SEQ ID NO: 1617 - DNA, 20 bp, synthetic construct
  misc_feature 1..20: note = B2M gRNA target site sequence
  source 1..20: mol_type = other DNA
agaggagttatacagctctg

SEQ ID NO: 1618 - DNA, 20 bp, synthetic construct
  misc_feature 1..20: note = B2M gRNA target site sequence
  source 1..20: mol_type = other DNA
gcagacatcccattcctgta

SEQ ID NO: 1619 - DNA, 20 bp, synthetic construct
  misc_feature 1..20: note = B2M gRNA target site sequence
  source 1..20: mol_type = other DNA
cagacatcccattcctgtat

SEQ ID NO: 1620 - DNA, 20 bp, synthetic construct
  misc_feature 1..20: note = B2M gRNA target site sequence
  source 1..20: mol_type = other DNA
agacatcccattcctgtatg

SEQ ID NO: 1621 - DNA, 20 bp, synthetic construct
  misc_feature 1..20: note = B2M gRNA target site sequence
  source 1..20: mol_type = other DNA
tggggactgtgtttgcctct

SEQ ID NO: 1622 - DNA, 20 bp, synthetic construct
  misc_feature 1..20: note = B2M gRNA target site sequence
  source 1..20: mol_type = other DNA
gggactgtgtttgcctctta

SEQ ID NO: 1623 - DNA, 20 bp, synthetic construct
  misc_feature 1..20: note = B2M gRNA target site sequence
  source 1..20: mol_type = other DNA
ggactgtgtttgcctcttag

SEQ ID NO: 1624 - DNA, 20 bp, synthetic construct
  misc_feature 1..20: note = B2M gRNA target site sequence
  source 1..20: mol_type = other DNA
gtttgcctcttagaggttcc

SEQ ID NO: 1625 - DNA, 20 bp, synthetic construct
  misc_feature 1..20: note = B2M gRNA target site sequence
  source 1..20: mol_type = other DNA
tttgcctcttagaggttccc

SEQ ID NO: 1626 - DNA, 20 bp, synthetic construct
  misc_feature 1..20: note = B2M gRNA target site sequence
  source 1..20: mol_type = other DNA
cttagaggttcccaggccac

SEQ ID NO: 1627 - DNA, 20 bp, synthetic construct
  misc_feature 1..20: note = B2M gRNA target site sequence
  source 1..20: mol_type = other DNA
tagaggttcccaggccacta

SEQ ID NO: 1628 - DNA, 20 bp, synthetic construct
  misc_feature 1..20: note = B2M gRNA target site sequence
  source 1..20: mol_type = other DNA
agaggttcccaggccactag

SEQ ID NO: 1629 - DNA, 20 bp, synthetic construct
  misc_feature 1..20: note = B2M gRNA target site sequence
  source 1..20: mol_type = other DNA
aggttcccaggccactagag

SEQ ID NO: 1630 - DNA, 20 bp, synthetic construct
  misc_feature 1..20: note = B2M gRNA target site sequence
  source 1..20: mol_type = other DNA
ccaggccactagaggagata

SEQ ID NO: 1631 - DNA, 20 bp, synthetic construct
  misc_feature 1..20: note = B2M gRNA target site sequence
  source 1..20: mol_type = other DNA
caggccactagaggagataa

SEQ ID NO: 1632 - DNA, 20 bp, synthetic construct
  misc_feature 1..20: note = B2M gRNA target site sequence
  source 1..20: mol_type = other DNA
aggccactagaggagataaa

SEQ ID NO: 1633 - DNA, 20 bp, synthetic construct
  misc_feature 1..20: note = B2M gRNA target site sequence
  source 1..20: mol_type = other DNA
ctagaggagataaagggaaa

SEQ ID NO: 1634 - DNA, 20 bp, synthetic construct
  misc_feature 1..20: note = B2M gRNA target site sequence
  source 1..20: mol_type = other DNA
ttgatataatgatactataa

SEQ ID NO: 1635 - DNA, 20 bp, synthetic construct
  misc_feature 1..20: note = B2M gRNA target site sequence
  source 1..20: mol_type = other DNA
actataatagatgtaactac

SEQ ID NO: 1636 - DNA, 20 bp, synthetic construct
  misc_feature 1..20: note = B2M gRNA target site sequence
  source 1..20: mol_type = other DNA
ctataatagatgtaactaca

SEQ ID NO: 1637 - DNA, 20 bp, synthetic construct
  misc_feature 1..20: note = B2M gRNA target site sequence
  source 1..20: mol_type = other DNA
ataatagatgtaactacaag

SEQ ID NO: 1638 - DNA, 20 bp, synthetic construct
  misc_feature 1..20: note = B2M gRNA target site sequence
  source 1..20: mol_type = other DNA
gatgtaactacaaggagctc

SEQ ID NO: 1639 - DNA, 20 bp, synthetic construct
  misc_feature 1..20: note = B2M gRNA target site sequence
  source 1..20: mol_type = other DNA
gtaactacaaggagctccag

SEQ ID NO: 1640 - DNA, 20 bp, synthetic construct
  misc_feature 1..20: note = B2M gRNA target site sequence
  source 1..20: mol_type = other DNA
ctacaaggagctccagaagc

SEQ ID NO: 1641 - DNA, 20 bp, synthetic construct
  misc_feature 1..20: note = B2M gRNA target site sequence
  source 1..20: mol_type = other DNA
acaaggagctccagaagcaa

SEQ ID NO: 1642 - DNA, 20 bp, synthetic construct
  misc_feature 1..20: note = B2M gRNA target site sequence
  source 1..20: mol_type = other DNA
aaggagctccagaagcaaga

SEQ ID NO: 1643 - DNA, 20 bp, synthetic construct
  misc_feature 1..20: note = B2M gRNA target site sequence
  source 1..20: mol_type = other DNA
ggagctccagaagcaagaga

SEQ ID NO: 1644 - DNA, 20 bp, synthetic construct
  misc_feature 1..20: note = B2M gRNA target site sequence
  source 1..20: mol_type = other DNA
gagctccagaagcaagagag

SEQ ID NO: 1645 - DNA, 20 bp, synthetic construct
  misc_feature 1..20: note = B2M gRNA target site sequence
  source 1..20: mol_type = other DNA
agctccagaagcaagagaga

SEQ ID NO: 1646 - DNA, 20 bp, synthetic construct
  misc_feature 1..20: note = B2M gRNA target site sequence
  source 1..20: mol_type = other DNA
ctccagaagcaagagagagg

SEQ ID NO: 1647 - DNA, 20 bp, synthetic construct
  misc_feature 1..20: note = B2M gRNA target site sequence
  source 1..20: mol_type = other DNA
tccagaagcaagagagaggg

SEQ ID NO: 1648 - DNA, 20 bp, synthetic construct
  misc_feature 1..20: note = B2M gRNA target site sequence
  source 1..20: mol_type = other DNA
gcaagagagagggaggaact

SEQ ID NO: 1649 - DNA, 20 bp, synthetic construct
  misc_feature 1..20: note = B2M gRNA target site sequence
  source 1..20: mol_type = other DNA
cttggacttctctgcatctt

SEQ ID NO: 1650 - DNA, 20 bp, synthetic construct
  misc_feature 1..20: note = B2M gRNA target site sequence
  source 1..20: mol_type = other DNA
gacttctctgcatctttagt

SEQ ID NO: 1651 - DNA, 20 bp, synthetic construct
  misc_feature 1..20: note = B2M gRNA target site sequence
  source 1..20: mol_type = other DNA
cttctctgcatctttagttg

SEQ ID NO: 1652 - DNA, 20 bp, synthetic construct
  misc_feature 1..20: note = B2M gRNA target site sequence
  source 1..20: mol_type = other DNA
gcatctttagttggagtcca

SEQ ID NO: 1653 - DNA, 20 bp, synthetic construct
  misc_feature 1..20: note = B2M gRNA target site sequence
  source 1..20: mol_type = other DNA
catctttagttggagtccaa

SEQ ID NO: 1654 - DNA, 20 bp, synthetic construct
  misc_feature 1..20: note = B2M gRNA target site sequence
  source 1..20: mol_type = other DNA
ttcaatgaaattctactgcc

SEQ ID NO: 1655 - DNA, 20 bp, synthetic construct
  misc_feature 1..20: note = B2M gRNA target site sequence
  source 1..20: mol_type = other DNA
tcaatgaaattctactgccc

SEQ ID NO: 1656 - DNA, 20 bp, synthetic construct
  misc_feature 1..20: note = B2M gRNA target site sequence
  source 1..20: mol_type = other DNA
caatgaaattctactgccca

SEQ ID NO: 1657 - DNA, 20 bp, synthetic construct
  misc_feature 1..20: note = B2M gRNA target site sequence
  source 1..20: mol_type = other DNA
tcaaatctcctgttatattc

SEQ ID NO: 1658 - DNA, 20 bp, synthetic construct
  misc_feature 1..20: note = B2M gRNA target site sequence
  source 1..20: mol_type = other DNA
tctcctgttatattctagaa

SEQ ID NO: 1659 - DNA, 20 bp, synthetic construct
  misc_feature 1..20: note = B2M gRNA target site sequence
  source 1..20: mol_type = other DNA
ctcctgttatattctagaac

SEQ ID NO: 1660 - DNA, 20 bp, synthetic construct
  misc_feature 1..20: note = B2M gRNA target site sequence
  source 1..20: mol_type = other DNA
tcctgttatattctagaaca

SEQ ID NO: 1661 - DNA, 20 bp, synthetic construct
  misc_feature 1..20: note = B2M gRNA target site sequence
  source 1..20: mol_type = other DNA
tctagaacagggaattgatt

SEQ ID NO: 1662 - DNA, 20 bp, synthetic construct
  misc_feature 1..20: note = B2M gRNA target site sequence
  source 1..20: mol_type = other DNA
ctagaacagggaattgattt

SEQ ID NO: 1663 - DNA, 20 bp, synthetic construct
  misc_feature 1..20: note = B2M gRNA target site sequence
  source 1..20: mol_type = other DNA
agaacagggaattgatttgg

SEQ ID NO: 1664 - DNA, 20 bp, synthetic construct
  misc_feature 1..20: note = B2M gRNA target site sequence
  source 1..20: mol_type = other DNA
aacagggaattgatttggga

SEQ ID NO: 1665 - DNA, 20 bp, synthetic construct
  misc_feature 1..20: note = B2M gRNA target site sequence
  source 1..20: mol_type = other DNA
gaattgatttgggagagcat

SEQ ID NO: 1666 - DNA, 20 bp, synthetic construct
  misc_feature 1..20: note = B2M gRNA target site sequence
  source 1..20: mol_type = other DNA
aattgatttgggagagcatc

SEQ ID NO: 1667 - DNA, 20 bp, synthetic construct
  misc_feature 1..20: note = B2M gRNA target site sequence
  source 1..20: mol_type = other DNA
tgatttgggagagcatcagg

SEQ ID NO: 1668 - DNA, 20 bp, synthetic construct
  misc_feature 1..20: note = B2M gRNA target site sequence
  source 1..20: mol_type = other DNA
gatttgggagagcatcagga

SEQ ID NO: 1669 - DNA, 20 bp, synthetic construct
  misc_feature 1..20: note = B2M gRNA target site sequence
  source 1..20: mol_type = other DNA
ttgggagagcatcaggaagg

SEQ ID NO: 1670 - DNA, 20 bp, synthetic construct
  misc_feature 1..20: note = B2M gRNA target site sequence
  source 1..20: mol_type = other DNA
aggaaggtggatgatctgcc

SEQ ID NO: 1671 - DNA, 20 bp, synthetic construct
  misc_feature 1..20: note = B2M gRNA target site sequence
  source 1..20: mol_type = other DNA
gatctgcccagtcacactgt

SEQ ID NO: 1672 - DNA, 20 bp, synthetic construct
  misc_feature 1..20: note = B2M gRNA target site sequence
  source 1..20: mol_type = other DNA
gtcacactgttagtaaattg

SEQ ID NO: 1673 - DNA, 20 bp, synthetic construct
  misc_feature 1..20: note = B2M gRNA target site sequence
  source 1..20: mol_type = other DNA
cacactgttagtaaattgta

SEQ ID NO: 1674 - DNA, 20 bp, synthetic construct
  misc_feature 1..20: note = B2M gRNA target site sequence
  source 1..20: mol_type = other DNA
ctgttagtaaattgtagagc

SEQ ID NO: 1675 - DNA, 20 bp, synthetic construct
  misc_feature 1..20: note = B2M gRNA target site sequence
  source 1..20: mol_type = other DNA
tgttagtaaattgtagagcc

SEQ ID NO: 1676 - DNA, 20 bp, synthetic construct
  misc_feature 1..20: note = B2M gRNA target site sequence
  source 1..20: mol_type = other DNA
ccaggacctgaactctaata

SEQ ID NO: 1677 - DNA, 20 bp, synthetic construct
  misc_feature 1..20: note = B2M gRNA target site sequence
  source 1..20: mol_type = other DNA
agtcatgtgttacttaatga

SEQ ID NO: 1678 - DNA, 20 bp, synthetic construct
  misc_feature 1..20: note = B2M gRNA target site sequence
  source 1..20: mol_type = other DNA
gtcatgtgttacttaatgac

SEQ ID NO: 1679 - DNA, 20 bp, synthetic construct
  misc_feature 1..20: note = B2M gRNA target site sequence
  source 1..20: mol_type = other DNA
tcatgtgttacttaatgacg

SEQ ID NO: 1680 - DNA, 20 bp, synthetic construct
  misc_feature 1..20: note = B2M gRNA target site sequence
  source 1..20: mol_type = other DNA
taatgacggggacatgttct

SEQ ID NO: 1681 - DNA, 20 bp, synthetic construct
  misc_feature 1..20: note = B2M gRNA target site sequence
  source 1..20: mol_type = other DNA
gagaaatgcttacacaaacc

SEQ ID NO: 1682 - DNA, 20 bp, synthetic construct
  misc_feature 1..20: note = B2M gRNA target site sequence
  source 1..20: mol_type = other DNA
agaaatgcttacacaaacct

SEQ ID NO: 1683 - DNA, 20 bp, synthetic construct
  misc_feature 1..20: note = B2M gRNA target site sequence
  source 1..20: mol_type = other DNA
ttacacaaacctaggtgttg

SEQ ID NO: 1684 - DNA, 20 bp, synthetic construct
  misc_feature 1..20: note = B2M gRNA target site sequence
  source 1..20: mol_type = other DNA
gttgtagcctactacacgca

SEQ ID NO: 1685 - DNA, 20 bp, synthetic construct
  misc_feature 1..20: note = B2M gRNA target site sequence
  source 1..20: mol_type = other DNA
ttgtagcctactacacgcat

SEQ ID NO: 1686 - DNA, 20 bp, synthetic construct
  misc_feature 1..20: note = B2M gRNA target site sequence
  source 1..20: mol_type = other DNA
tactacacgcataggctaca

SEQ ID NO: 1687 - DNA, 20 bp, synthetic construct
  misc_feature 1..20: note = B2M gRNA target site sequence
  source 1..20: mol_type = other DNA
cacgcataggctacatggta

SEQ ID NO: 1688 - DNA, 20 bp, synthetic construct
  misc_feature 1..20: note = B2M gRNA target site sequence
  source 1..20: mol_type = other DNA
atggtatagcctattgctcc

SEQ ID NO: 1689 - DNA, 20 bp, synthetic construct
  misc_feature 1..20: note = B2M gRNA target site sequence
  source 1..20: mol_type = other DNA
tcctagactacaaacctgta

SEQ ID NO: 1690 - DNA, 20 bp, synthetic construct
  misc_feature 1..20: note = B2M gRNA target site sequence
  source 1..20: mol_type = other DNA
tgttactgtactgaatactg

SEQ ID NO: 1691 - DNA, 20 bp, synthetic construct
  misc_feature 1..20: note = B2M gRNA target site sequence
  source 1..20: mol_type = other DNA
gttactgtactgaatactgt

SEQ ID NO: 1692 - DNA, 20 bp, synthetic construct
  misc_feature 1..20: note = B2M gRNA target site sequence
  source 1..20: mol_type = other DNA
actgtactgaatactgtggg

SEQ ID NO: 1693 - DNA, 20 bp, synthetic construct
  misc_feature 1..20: note = B2M gRNA target site sequence
  source 1..20: mol_type = other DNA
tgtgggcagttgtaacacaa

SEQ ID NO: 1694 - DNA, 20 bp, synthetic construct
  misc_feature 1..20: note = B2M gRNA target site sequence
  source 1..20: mol_type = other DNA
ggcagttgtaacacaatggt

SEQ ID NO: 1695 - DNA, 20 bp, synthetic construct
  misc_feature 1..20: note = B2M gRNA target site sequence
  source 1..20: mol_type = other DNA
agtatttgtgtatctaaaca

SEQ ID NO: 1696 - DNA, 20 bp, synthetic construct
  misc_feature 1..20: note = B2M gRNA target site sequence
  source 1..20: mol_type = other DNA
atttgtgtatctaaacatag

SEQ ID NO: 1697 - DNA, 20 bp, synthetic construct
  misc_feature 1..20: note = B2M gRNA target site sequence
  source 1..20: mol_type = other DNA
gtatctaaacatagaagttg

SEQ ID NO: 1698 - DNA, 20 bp, synthetic construct
  misc_feature 1..20: note = B2M gRNA target site sequence
  source 1..20: mol_type = other DNA
atatgctattttaatcttat

SEQ ID NO: 1699 - DNA, 20 bp, synthetic construct
  misc_feature 1..20: note = B2M gRNA target site sequence
  source 1..20: mol_type = other DNA
tgagaccactgtcatatata

SEQ ID NO: 1700 - DNA, 20 bp, synthetic construct
  misc_feature 1..20: note = B2M gRNA target site sequence
  source 1..20: mol_type = other DNA
cattgaccaaaacatcatat

SEQ ID NO: 1701 - DNA, 20 bp, synthetic construct
  misc_feature 1..20: note = B2M gRNA target site sequence
  source 1..20: mol_type = other DNA
atatcagcattttttcttct

SEQ ID NO: 1702 - DNA, 20 bp, synthetic construct
  misc_feature 1..20: note = B2M gRNA target site sequence
  source 1..20: mol_type = other DNA
cattttttcttctaagattt

SEQ ID NO: 1703 - DNA, 20 bp, synthetic construct
  misc_feature 1..20: note = B2M gRNA target site sequence
  source 1..20: mol_type = other DNA
attttttcttctaagatttt

SEQ ID NO: 1704 - DNA, 20 bp, synthetic construct
  misc_feature 1..20: note = B2M gRNA target site sequence
  source 1..20: mol_type = other DNA
tttttcttctaagattttgg

SEQ ID NO: 1705 - DNA, 20 bp, synthetic construct
  misc_feature 1..20: note = B2M gRNA target site sequence
  source 1..20: mol_type = other DNA
ctaagattttgggagcacca

SEQ ID NO: 1706 - DNA, 20 bp, synthetic construct
  misc_feature 1..20: note = B2M gRNA target site sequence
  source 1..20: mol_type = other DNA
taagattttgggagcaccaa

SEQ ID NO: 1707 - DNA, 20 bp, synthetic construct
  misc_feature 1..20: note = B2M gRNA target site sequence
  source 1..20: mol_type = other DNA
aagattttgggagcaccaaa

SEQ ID NO: 1708 - DNA, 20 bp, synthetic construct
  misc_feature 1..20: note = B2M gRNA target site sequence
  source 1..20: mol_type = other DNA
gcaccaaagggatacactaa

SEQ ID NO: 1709 - DNA, 20 bp, synthetic construct
  misc_feature 1..20: note = B2M gRNA target site sequence
  source 1..20: mol_type = other DNA
caccaaagggatacactaac

SEQ ID NO: 1710 - DNA, 20 bp, synthetic construct
  misc_feature 1..20: note = B2M gRNA target site sequence
  source 1..20: mol_type = other DNA
acaggatatactctttataa

SEQ ID NO: 1711 - DNA, 20 bp, synthetic construct
  misc_feature 1..20: note = B2M gRNA target site sequence
  source 1..20: mol_type = other DNA
caggatatactctttataat

SEQ ID NO: 1712 - DNA, 20 bp, synthetic construct
  misc_feature 1..20: note = B2M gRNA target site sequence
  source 1..20: mol_type = other DNA
tatactctttataatgggtt

SEQ ID NO: 1713 - DNA, 20 bp, synthetic construct
  misc_feature 1..20: note = B2M gRNA target site sequence
  source 1..20: mol_type = other DNA
tactctttataatgggtttg

SEQ ID NO: 1714 - DNA, 20 bp, synthetic construct
  misc_feature 1..20: note = B2M gRNA target site sequence
  source 1..20: mol_type = other DNA
tgggtttggagaactgtctg

SEQ ID NO: 1715 - DNA, 20 bp, synthetic construct
  misc_feature 1..20: note = B2M gRNA target site sequence
  source 1..20: mol_type = other DNA
ctgcagctacttcttttaaa

SEQ ID NO: 1716 - DNA, 20 bp, synthetic construct
  misc_feature 1..20: note = B2M gRNA target site sequence
  source 1..20: mol_type = other DNA
tgcagctacttcttttaaaa

SEQ ID NO: 1717 - DNA, 20 bp, synthetic construct
  misc_feature 1..20: note = B2M gRNA target site sequence
  source 1..20: mol_type = other DNA
ttttaaaaaggtgatctaca

SEQ ID NO: 1718 - DNA, 20 bp, synthetic construct
  misc_feature 1..20: note = B2M gRNA target site sequence
  source 1..20: mol_type = other DNA
taaaaaggtgatctacacag

SEQ ID NO: 1719 - DNA, 20 bp, synthetic construct
  misc_feature 1..20: note = B2M gRNA target site sequence
  source 1..20: mol_type = other DNA
gtgatctacacagtagaaat

SEQ ID NO: 1720 - DNA, 20 bp, synthetic construct
  misc_feature 1..20: note = B2M gRNA target site sequence
  source 1..20: mol_type = other DNA
ctacacagtagaaattagac

SEQ ID NO: 1721 - DNA, 20 bp, synthetic construct
  misc_feature 1..20: note = B2M gRNA target site sequence
  source 1..20: mol_type = other DNA
cagtagaaattagacaagtt

SEQ ID NO: 1722 - DNA, 20 bp, synthetic construct
  misc_feature 1..20: note = B2M gRNA target site sequence
  source 1..20: mol_type = other DNA
aattagacaagtttggtaat

SEQ ID NO: 1723 - DNA, 20 bp, synthetic construct
  misc_feature 1..20: note = B2M gRNA target site sequence
  source 1..20: mol_type = other DNA
taacctttttcttttctttt

SEQ ID NO: 1724 - DNA, 20 bp, synthetic construct
  misc_feature 1..20: note = B2M gRNA target site sequence
  source 1..20: mol_type = other DNA
aacctttttcttttcttttc

SEQ ID NO: 1725 - DNA, 20 bp, synthetic construct
  misc_feature 1..20: note = B2M gRNA target site sequence
  source 1..20: mol_type = other DNA
ttcttttcttttcaggtttg

SEQ ID NO: 1726 - DNA, 20 bp, synthetic construct
  misc_feature 1..20: note = B2M gRNA target site sequence
  source 1..20: mol_type = other DNA
aggtttgaagatgccgcatt

SEQ ID NO: 1727 - DNA, 20 bp, synthetic construct
  misc_feature 1..20: note = B2M gRNA target site sequence
  source 1..20: mol_type = other DNA
tgaagatgccgcatttggat

SEQ ID NO: 1728 - DNA, 20 bp, synthetic construct
  misc_feature 1..20: note = B2M gRNA target site sequence
  source 1..20: mol_type = other DNA
tacactttatgcacaaaatg

SEQ ID NO: 1729 - DNA, 20 bp, synthetic construct
  misc_feature 1..20: note = B2M gRNA target site sequence
  source 1..20: mol_type = other DNA
acactttatgcacaaaatgt

SEQ ID NO: 1730 - DNA, 20 bp, synthetic construct
  misc_feature 1..20: note = B2M gRNA target site sequence
  source 1..20: mol_type = other DNA
cactttatgcacaaaatgta

SEQ ID NO: 1731 - DNA, 20 bp, synthetic construct
  misc_feature 1..20: note = B2M gRNA target site sequence
  source 1..20: mol_type = other DNA
gggttataataatgttaaca

SEQ ID NO: 1732 - DNA, 20 bp, synthetic construct
  misc_feature 1..20: note = B2M gRNA target site sequence
  source 1..20: mol_type = other DNA
cttctttataattctacttt

SEQ ID NO: 1733 - DNA, 20 bp, synthetic construct
  misc_feature 1..20: note = B2M gRNA target site sequence
  source 1..20: mol_type = other DNA
tctccatgtttgatgtatct

SEQ ID NO: 1734 - DNA, 20 bp, synthetic construct
  misc_feature 1..20: note = B2M gRNA target site sequence
  source 1..20: mol_type = other DNA
ccatgtttgatgtatctgag

SEQ ID NO: 1735 - DNA, 20 bp, synthetic construct
  misc_feature 1..20: note = B2M gRNA target site sequence
  source 1..20: mol_type = other DNA
catgtttgatgtatctgagc

SEQ ID NO: 1736 - DNA, 20 bp, synthetic construct
  misc_feature 1..20: note = B2M gRNA target site sequence
  source 1..20: mol_type = other DNA
tatctgagcaggttgctcca

SEQ ID NO: 1737 - DNA, 20 bp, synthetic construct
  misc_feature 1..20: note = B2M gRNA target site sequence
  source 1..20: mol_type = other DNA
atctgagcaggttgctccac

SEQ ID NO: 1738 - DNA, 20 bp, synthetic construct
  misc_feature 1..20: note = B2M gRNA target site sequence
  source 1..20: mol_type = other DNA
tgagcaggttgctccacagg

SEQ ID NO: 1739 - DNA, 20 bp, synthetic construct
  misc_feature 1..20: note = B2M gRNA target site sequence
  source 1..20: mol_type = other DNA
ggttgctccacaggtagctc

SEQ ID NO: 1740 - DNA, 20 bp, synthetic construct
  misc_feature 1..20: note = B2M gRNA target site sequence
  source 1..20: mol_type = other DNA
gttgctccacaggtagctct

SEQ ID NO: 1741 - DNA, 20 bp, synthetic construct
  misc_feature 1..20: note = B2M gRNA target site sequence
  source 1..20: mol_type = other DNA
tgctccacaggtagctctag

SEQ ID NO: 1742 - DNA, 20 bp, synthetic construct
  misc_feature 1..20: note = B2M gRNA target site sequence
  source 1..20: mol_type = other DNA
gctccacaggtagctctagg

SEQ ID NO: 1743 - DNA, 20 bp, synthetic construct
  misc_feature 1..20: note = B2M gRNA target site sequence
  source 1..20: mol_type = other DNA
ctccacaggtagctctagga

SEQ ID NO: 1744 - DNA, 20 bp, synthetic construct
  misc_feature 1..20: note = B2M gRNA target site sequence
  source 1..20: mol_type = other DNA
acaggtagctctaggagggc

SEQ ID NO: 1745 - DNA, 20 bp, synthetic construct
  misc_feature 1..20: note = B2M gRNA target site sequence
  source 1..20: mol_type = other DNA
ctctaggagggctggcaact

SEQ ID NO: 1746 - DNA, 20 bp, synthetic construct
  misc_feature 1..20: note = B2M gRNA target site sequence
  source 1..20: mol_type = other DNA
ctaggagggctggcaactta

SEQ ID NO: 1747 - DNA, 20 bp, synthetic construct
  misc_feature 1..20: note = B2M gRNA target site sequence
  source 1..20: mol_type = other DNA
taggagggctggcaacttag

SEQ ID NO: 1748 - DNA, 20 bp, synthetic construct
  misc_feature 1..20: note = B2M gRNA target site sequence
  source 1..20: mol_type = other DNA
gagggctggcaacttagagg

SEQ ID NO: 1749 - DNA, 20 bp, synthetic construct
  misc_feature 1..20: note = B2M gRNA target site sequence
  source 1..20: mol_type = other DNA
agggctggcaacttagaggt

SEQ ID NO: 1750 - DNA, 20 bp, synthetic construct
  misc_feature 1..20: note = B2M gRNA target site sequence
  source 1..20: mol_type = other DNA
gggctggcaacttagaggtg

SEQ ID NO: 1751 - DNA, 20 bp, synthetic construct
  misc_feature 1..20: note = B2M gRNA target site sequence
  source 1..20: mol_type = other DNA
gctggcaacttagaggtggg

SEQ ID NO: 1752 - DNA, 20 bp, synthetic construct
  misc_feature 1..20: note = B2M gRNA target site sequence
  source 1..20: mol_type = other DNA
ggcaacttagaggtggggag

SEQ ID NO: 1753 - DNA, 20 bp, synthetic construct
  misc_feature 1..20: note = B2M gRNA target site sequence
  source 1..20: mol_type = other DNA
caacttagaggtggggagca

SEQ ID NO: 1754 - DNA, 20 bp, synthetic construct
  misc_feature 1..20: note = B2M gRNA target site sequence
  source 1..20: mol_type = other DNA
cttatccaacatcaacatct

SEQ ID NO: 1755 - DNA, 20 bp, synthetic construct
  misc_feature 1..20: note = B2M gRNA target site sequence
  source 1..20: mol_type = other DNA
tccaacatcaacatcttggt

SEQ ID NO: 1756 - DNA, 20 bp, synthetic construct
  misc_feature 1..20: note = B2M gRNA target site sequence
  source 1..20: mol_type = other DNA
tcttcaatctcttgcactca

SEQ ID NO: 1757 - DNA, 20 bp, synthetic construct
  misc_feature 1..20: note = B2M gRNA target site sequence
  source 1..20: mol_type = other DNA
tcttgcactcaaagcttgtt

SEQ ID NO: 1758 - DNA, 20 bp, synthetic construct
  misc_feature 1..20: note = B2M gRNA target site sequence
  source 1..20: mol_type = other DNA
gcactcaaagcttgttaaga

SEQ ID NO: 1759 - DNA, 20 bp, synthetic construct
  misc_feature 1..20: note = B2M gRNA target site sequence
  source 1..20: mol_type = other DNA
caaagcttgttaagatagtt

SEQ ID NO: 1760 - DNA, 20 bp, synthetic construct
  misc_feature 1..20: note = B2M gRNA target site sequence
  source 1..20: mol_type = other DNA
taagatagttaagcgtgcat

SEQ ID NO: 1761 - DNA, 20 bp, synthetic construct
  misc_feature 1..20: note = B2M gRNA target site sequence
  source 1..20: mol_type = other DNA
tccaatttacatactctgct

SEQ ID NO: 1762 - DNA, 20 bp, synthetic construct
  misc_feature 1..20: note = B2M gRNA target site sequence
  source 1..20: mol_type = other DNA
tacatactctgcttagaatt

SEQ ID NO: 1763 - DNA, 20 bp, synthetic construct
  misc_feature 1..20: note = B2M gRNA target site sequence
  source 1..20: mol_type = other DNA
acatactctgcttagaattt

SEQ ID NO: 1764 - DNA, 20 bp, synthetic construct
  misc_feature 1..20: note = B2M gRNA target site sequence
  source 1..20: mol_type = other DNA
catactctgcttagaatttg

SEQ ID NO: 1765 - DNA, 20 bp, synthetic construct
  misc_feature 1..20: note = B2M gRNA target site sequence
  source 1..20: mol_type = other DNA
atactctgcttagaatttgg

SEQ ID NO: 1766 - DNA, 20 bp, synthetic construct
  misc_feature 1..20: note = B2M gRNA target site sequence
  source 1..20: mol_type = other DNA
ttagaatttgggggaaaatt

SEQ ID NO: 1767 - DNA, 20 bp, synthetic construct
  misc_feature 1..20: note = B2M gRNA target site sequence
  source 1..20: mol_type = other DNA
aaatttagaaatataattga

SEQ ID NO: 1768 - DNA, 20 bp, synthetic construct
  misc_feature 1..20: note = B2M gRNA target site sequence
  source 1..20: mol_type = other DNA
aatttagaaatataattgac

SEQ ID NO: 1769 - DNA, 20 bp, synthetic construct
  misc_feature 1..20: note = B2M gRNA target site sequence
  source 1..20: mol_type = other DNA
aatataattgacaggattat

SEQ ID NO: 1770 - DNA, 20 bp, synthetic construct
  misc_feature 1..20: note = B2M gRNA target site sequence
  source 1..20: mol_type = other DNA
aatgaaacattttgtcatat

SEQ ID NO: 1771 - DNA, 20 bp, synthetic construct
  misc_feature 1..20: note = B2M gRNA target site sequence
  source 1..20: mol_type = other DNA
tacttcttatacatttgata

SEQ ID NO: 1772 - DNA, 20 bp, synthetic construct
  misc_feature 1..20: note = B2M gRNA target site sequence
  source 1..20: mol_type = other DNA
tcttatacatttgataaagt

SEQ ID NO: 1773 - DNA, 20 bp, synthetic construct
  misc_feature 1..20: note = B2M gRNA target site sequence
  source 1..20: mol_type = other DNA
cttatacatttgataaagta

SEQ ID NO: 1774 - DNA, 20 bp, synthetic construct
  misc_feature 1..20: note = B2M gRNA target site sequence
  source 1..20: mol_type = other DNA
acatttgataaagtaaggca

SEQ ID NO: 1775 - DNA, 20 bp, synthetic construct
  misc_feature 1..20: note = B2M gRNA target site sequence
  source 1..20: mol_type = other DNA
gataaagtaaggcatggttg

SEQ ID NO: 1776 - DNA, 20 bp, synthetic construct
  misc_feature 1..20: note = B2M gRNA target site sequence
  source 1..20: mol_type = other DNA
aggcatggttgtggttaatc

SEQ ID NO: 1777 - DNA, 20 bp, synthetic construct
  misc_feature 1..20: note = B2M gRNA target site sequence
  source 1..20: mol_type = other DNA
ctggtttatttttgttccac

SEQ ID NO: 1778 - DNA, 20 bp, synthetic construct
  misc_feature 1..20: note = B2M gRNA target site sequence
  source 1..20: mol_type = other DNA
attacccctttattttcaaa

SEQ ID NO: 1779 - DNA, 20 bp, synthetic construct
  misc_feature 1..20: note = B2M gRNA target site sequence
  source 1..20: mol_type = other DNA
ttacccctttattttcaaac

SEQ ID NO: 1780 - DNA, 20 bp, synthetic construct
  misc_feature 1..20: note = B2M gRNA target site sequence
  source 1..20: mol_type = other DNA
tacccctttattttcaaaca

SEQ ID NO: 1781 - DNA, 20 bp, synthetic construct
  misc_feature 1..20: note = B2M gRNA target site sequence
  source 1..20: mol_type = other DNA
tttattttcaaacagggaaa

SEQ ID NO: 1782 - DNA, 20 bp, synthetic construct
  misc_feature 1..20: note = B2M gRNA target site sequence
  source 1..20: mol_type = other DNA
tgtttccctgtttgaaaata

SEQ ID NO: 1783 - DNA, 20 bp, synthetic construct
  misc_feature 1..20: note = B2M gRNA target site sequence
  source 1..20: mol_type = other DNA
gtttccctgtttgaaaataa

SEQ ID NO: 1784 - DNA, 20 bp, synthetic construct
  misc_feature 1..20: note = B2M gRNA target site sequence
  source 1..20: mol_type = other DNA
tttccctgtttgaaaataaa

SEQ ID NO: 1785 - DNA, 20 bp, synthetic construct
  misc_feature 1..20: note = B2M gRNA target site sequence
  source 1..20: mol_type = other DNA
ttccctgtttgaaaataaag

SEQ ID NO: 1786 - DNA, 20 bp, synthetic construct
  misc_feature 1..20: note = B2M gRNA target site sequence
  source 1..20: mol_type = other DNA
gtttgaaaataaaggggtaa

SEQ ID NO: 1787 - DNA, 20 bp, synthetic construct
  misc_feature 1..20: note = B2M gRNA target site sequence
  source 1..20: mol_type = other DNA
tgaaaataaaggggtaatag

SEQ ID NO: 1788 - DNA, 20 bp, synthetic construct
  misc_feature 1..20: note = B2M gRNA target site sequence
  source 1..20: mol_type = other DNA
gaaaataaaggggtaatagt

SEQ ID NO: 1789 - DNA, 20 bp, synthetic construct
  misc_feature 1..20: note = B2M gRNA target site sequence
  source 1..20: mol_type = other DNA
aaataaaggggtaatagtgg

SEQ ID NO: 1790 - DNA, 20 bp, synthetic construct
  misc_feature 1..20: note = B2M gRNA target site sequence
  source 1..20: mol_type = other DNA
aaaggggtaatagtgggagt

SEQ ID NO: 1791 - DNA, 20 bp, synthetic construct
  misc_feature 1..20: note = B2M gRNA target site sequence
  source 1..20: mol_type = other DNA
taatagtgggagtgagatat

SEQ ID NO: 1792 - DNA, 20 bp, synthetic construct
  misc_feature 1..20: note = B2M gRNA target site sequence
  source 1..20: mol_type = other DNA
atagtgggagtgagatataa

SEQ ID NO: 1793 - DNA, 20 bp, synthetic construct
  misc_feature 1..20: note = B2M gRNA target site sequence
  source 1..20: mol_type = other DNA
gatataagagataacacatc

SEQ ID NO: 1794 - DNA, 20 bp, synthetic construct
  misc_feature 1..20: note = B2M gRNA target site sequence
  source 1..20: mol_type = other DNA
tttatgatttatttaacttg

SEQ ID NO: 1795 - DNA, 20 bp, synthetic construct
  misc_feature 1..20: note = B2M gRNA target site sequence
  source 1..20: mol_type = other DNA
cttgtggaacaaaaataaac

SEQ ID NO: 1796 - DNA, 20 bp, synthetic construct
  misc_feature 1..20: note = B2M gRNA target site sequence
  source 1..20: mol_type = other DNA
ccttactttatcaaatgtat

SEQ ID NO: 1797 - DNA, 20 bp, synthetic construct
  misc_feature 1..20: note = B2M gRNA target site sequence
  source 1..20: mol_type = other DNA
tactttatcaaatgtataag

SEQ ID NO: 1798 - DNA, 20 bp, synthetic construct
  misc_feature 1..20: note = B2M gRNA target site sequence
  source 1..20: mol_type = other DNA
taaattttcccccaaattct

SEQ ID NO: 1799 - DNA, 20 bp, synthetic construct
  misc_feature 1..20: note = B2M gRNA target site sequence
  source 1..20: mol_type = other DNA
attttcccccaaattctaag

SEQ ID NO: 1800 - DNA, 20 bp, synthetic construct
  misc_feature 1..20: note = B2M gRNA target site sequence
  source 1..20: mol_type = other DNA
tttcccccaaattctaagca

SEQ ID NO: 1801 - DNA, 20 bp, synthetic construct
  misc_feature 1..20: note = B2M gRNA target site sequence
  source 1..20: mol_type = other DNA
tctaagcagagtatgtaaat

SEQ ID NO: 1802 - DNA, 20 bp, synthetic construct
  misc_feature 1..20: note = B2M gRNA target site sequence
  source 1..20: mol_type = other DNA
aagcagagtatgtaaattgg

SEQ ID NO: 1803 - DNA, 20 bp, synthetic construct
  misc_feature 1..20: note = B2M gRNA target site sequence
  source 1..20: mol_type = other DNA
gcacgcttaactatcttaac

SEQ ID NO: 1804 - DNA, 20 bp, synthetic construct
  misc_feature 1..20: note = B2M gRNA target site sequence
  source 1..20: mol_type = other DNA
taactatcttaacaagcttt

SEQ ID NO: 1805 - DNA, 20 bp, synthetic construct
  misc_feature 1..20: note = B2M gRNA target site sequence
  source 1..20: mol_type = other DNA
tcttaacaagctttgagtgc

SEQ ID NO: 1806 - DNA, 20 bp, synthetic construct
  misc_feature 1..20: note = B2M gRNA target site sequence
  source 1..20: mol_type = other DNA
ttaacaagctttgagtgcaa

SEQ ID NO: 1807 - DNA, 20 bp, synthetic construct
  misc_feature 1..20: note = B2M gRNA target site sequence
  source 1..20: mol_type = other DNA
gctttgagtgcaagagattg

SEQ ID NO: 1808 - DNA, 20 bp, synthetic construct
  misc_feature 1..20: note = B2M gRNA target site sequence
  source 1..20: mol_type = other DNA
tttgagtgcaagagattgaa

SEQ ID NO: 1809 - DNA, 20 bp, synthetic construct
  misc_feature 1..20: note = B2M gRNA target site sequence
  source 1..20: mol_type = other DNA
tgaagagttcaaatctgacc

SEQ ID NO: 1810 - DNA, 20 bp, synthetic construct
  misc_feature 1..20: note = B2M gRNA target site sequence
  source 1..20: mol_type = other DNA
tctgaccaagatgttgatgt

SEQ ID NO: 1811 - DNA, 20 bp, synthetic construct
  misc_feature 1..20: note = B2M gRNA target site sequence
  source 1..20: mol_type = other DNA
ccaagatgttgatgttggat

SEQ ID NO: 1812 - DNA, 20 bp, synthetic construct
  misc_feature 1..20: note = B2M gRNA target site sequence
  source 1..20: mol_type = other DNA
aagatgttgatgttggataa

SEQ ID NO: 1813 - DNA, 20 bp, synthetic construct
  misc_feature 1..20: note = B2M gRNA target site sequence
  source 1..20: mol_type = other DNA
attctctgctccccacctct

SEQ ID NO: 1814 - DNA, 20 bp, synthetic construct
  misc_feature 1..20: note = B2M gRNA target site sequence
  source 1..20: mol_type = other DNA
gctccccacctctaagttgc

SEQ ID NO: 1815 - DNA, 20 bp, synthetic construct
  misc_feature 1..20: note = B2M gRNA target site sequence
  source 1..20: mol_type = other DNA
ctctaagttgccagccctcc

SEQ ID NO: 1816 - DNA, 20 bp, synthetic construct
  misc_feature 1..20: note = B2M gRNA target site sequence
  source 1..20: mol_type = other DNA
ctaagttgccagccctccta

SEQ ID NO: 1817 - DNA, 20 bp, synthetic construct
  misc_feature 1..20: note = B2M gRNA target site sequence
  source 1..20: mol_type = other DNA
agccctcctagagctacctg

SEQ ID NO: 1818 - DNA, 20 bp, synthetic construct
  misc_feature 1..20: note = B2M gRNA target site sequence
  source 1..20: mol_type = other DNA
ccctcctagagctacctgtg

SEQ ID NO: 1819 - DNA, 20 bp, synthetic construct
  misc_feature 1..20: note = B2M gRNA target site sequence
  source 1..20: mol_type = other DNA
tacctgtggagcaacctgct

SEQ ID NO: 1820 - DNA, 20 bp, synthetic construct
  misc_feature 1..20: note = B2M gRNA target site sequence
  source 1..20: mol_type = other DNA
ctgctcagatacatcaaaca

SEQ ID NO: 1821 - DNA, 20 bp, synthetic construct
  misc_feature 1..20: note = B2M gRNA target site sequence
  source 1..20: mol_type = other DNA
gctcagatacatcaaacatg

SEQ ID NO: 1822 - DNA, 20 bp, synthetic construct
  misc_feature 1..20: note = B2M gRNA target site sequence
  source 1..20: mol_type = other DNA
agatacatcaaacatggaga

SEQ ID NO: 1823 - DNA, 20 bp, synthetic construct
  misc_feature 1..20: note = B2M gRNA target site sequence
  source 1..20: mol_type = other DNA
aaacatggagacagcactca

SEQ ID NO: 1824 - DNA, 20 bp, synthetic construct
  misc_feature 1..20: note = B2M gRNA target site sequence
  source 1..20: mol_type = other DNA
catggagacagcactcaaag

SEQ ID NO: 1825 - DNA, 20 bp, synthetic construct
  misc_feature 1..20: note = B2M gRNA target site sequence
  source 1..20: mol_type = other DNA
gcactcaaagtagaattata

SEQ ID NO: 1826 - DNA, 20 bp, synthetic construct
  misc_feature 1..20: note = B2M gRNA target site sequence
  source 1..20: mol_type = other DNA
ctcaaagtagaattataaag

SEQ ID NO: 1827 - DNA, 20 bp, synthetic construct
  misc_feature 1..20: note = B2M gRNA target site sequence
  source 1..20: mol_type = other DNA
aaccctacattttgtgcata

SEQ ID NO: 1828 - DNA, 20 bp, synthetic construct
  misc_feature 1..20: note = B2M gRNA target site sequence
  source 1..20: mol_type = other DNA
acattttgtgcataaagtgt

SEQ ID NO: 1829 - DNA, 20 bp, synthetic construct
  misc_feature 1..20: note = B2M gRNA target site sequence
  source 1..20: mol_type = other DNA
tgcataaagtgtaagtgtat

SEQ ID NO: 1830 - DNA, 20 bp, synthetic construct
  misc_feature 1..20: note = B2M gRNA target site sequence
  source 1..20: mol_type = other DNA
ataagcatatcaatattaaa

SEQ ID NO: 1831 - DNA, 20 bp, synthetic construct
  misc_feature 1..20: note = B2M gRNA target site sequence
  source 1..20: mol_type = other DNA
gcatatcaatattaaaaagc

SEQ ID NO: 1832 - DNA, 20 bp, synthetic construct
  misc_feature 1..20: note = B2M gRNA target site sequence
  source 1..20: mol_type = other DNA
atcaatattaaaaagcaagc

SEQ ID NO: 1833 - DNA, 20 bp, synthetic construct
  misc_feature 1..20: note = B2M gRNA target site sequence
  source 1..20: mol_type = other DNA
aatattaaaaagcaagcaag

SEQ ID NO: 1834 - DNA, 20 bp, synthetic construct
  misc_feature 1..20: note = B2M gRNA target site sequence
  source 1..20: mol_type = other DNA
aaaagcaagcaagcagaatt

SEQ ID NO: 1835 - DNA, 20 bp, synthetic construct
  misc_feature 1..20: note = B2M gRNA target site sequence
  source 1..20: mol_type = other DNA
gaattcatccaatccaaatg

SEQ ID NO: 1836 - DNA, 20 bp, synthetic construct
  misc_feature 1..20: note = B2M gRNA target site sequence
  source 1..20: mol_type = other DNA
gcggcatcttcaaacctgaa

SEQ ID NO: 1837 - DNA, 20 bp, synthetic construct
  misc_feature 1..20: note = B2M gRNA target site sequence
  source 1..20: mol_type = other DNA
atcttcaaacctgaaaagaa

SEQ ID NO: 1838 - DNA, 20 bp, synthetic construct
  misc_feature 1..20: note = B2M gRNA target site sequence
  source 1..20: mol_type = other DNA
aaacctgaaaagaaaagaaa

SEQ ID NO: 1839 - DNA, 20 bp, synthetic construct
  misc_feature 1..20: note = B2M gRNA target site sequence
  source 1..20: mol_type = other DNA
aacctgaaaagaaaagaaaa

SEQ ID NO: 1840 - DNA, 20 bp, synthetic construct
  misc_feature 1..20: note = B2M gRNA target site sequence
  source 1..20: mol_type = other DNA
tgaaaagaaaagaaaaaggt

SEQ ID NO: 1841 - DNA, 20 bp, synthetic construct
  misc_feature 1..20: note = B2M gRNA target site sequence
  source 1..20: mol_type = other DNA
agcaatgaatttattttatt

SEQ ID NO: 1842 - DNA, 20 bp, synthetic construct
  misc_feature 1..20: note = B2M gRNA target site sequence
  source 1..20: mol_type = other DNA
aatttattttatttggattg

SEQ ID NO: 1843 - DNA, 20 bp, synthetic construct
  misc_feature 1..20: note = B2M gRNA target site sequence
  source 1..20: mol_type = other DNA
cttgtctaatttctactgtg

SEQ ID NO: 1844 - DNA, 20 bp, synthetic construct
  misc_feature 1..20: note = B2M gRNA target site sequence
  source 1..20: mol_type = other DNA
tgtgtagatcacctttttaa

SEQ ID NO: 1845 - DNA, 20 bp, synthetic construct
  misc_feature 1..20: note = B2M gRNA target site sequence
  source 1..20: mol_type = other DNA
gtagatcacctttttaaaag

SEQ ID NO: 1846 - DNA, 20 bp, synthetic construct
  misc_feature 1..20: note = B2M gRNA target site sequence
  source 1..20: mol_type = other DNA
gatcacctttttaaaagaag

SEQ ID NO: 1847 - DNA, 20 bp, synthetic construct
  misc_feature 1..20: note = B2M gRNA target site sequence
  source 1..20: mol_type = other DNA
ctttttaaaagaagtagctg

SEQ ID NO: 1848 - DNA, 20 bp, synthetic construct
  misc_feature 1..20: note = B2M gRNA target site sequence
  source 1..20: mol_type = other DNA
ttaaaagaagtagctgcaga

SEQ ID NO: 1849 - DNA, 20 bp, synthetic construct
  misc_feature 1..20: note = B2M gRNA target site sequence
  source 1..20: mol_type = other DNA
agttctccaaacccattata

SEQ ID NO: 1850 - DNA, 20 bp, synthetic construct
  misc_feature 1..20: note = B2M gRNA target site sequence
  source 1..20: mol_type = other DNA
ttctccaaacccattataaa

SEQ ID NO: 1851 - DNA, 20 bp, synthetic construct
  misc_feature 1..20: note = B2M gRNA target site sequence
  source 1..20: mol_type = other DNA
ttataaagagtatatcctgt

SEQ ID NO: 1852 - DNA, 20 bp, synthetic construct
  misc_feature 1..20: note = B2M gRNA target site sequence
  source 1..20: mol_type = other DNA
atcctgttagtgtatccctt

SEQ ID NO: 1853 - DNA, 20 bp, synthetic construct
  misc_feature 1..20: note = B2M gRNA target site sequence
  source 1..20: mol_type = other DNA
ctttggtgctcccaaaatct

SEQ ID NO: 1854 - DNA, 20 bp, synthetic construct
  misc_feature 1..20: note = B2M gRNA target site sequence
  source 1..20: mol_type = other DNA
tggtgctcccaaaatcttag

SEQ ID NO: 1855 - DNA, 20 bp, synthetic construct
  misc_feature 1..20: note = B2M gRNA target site sequence
  source 1..20: mol_type = other DNA
aaaatgctgatatgatgttt

SEQ ID NO: 1856 - DNA, 20 bp, synthetic construct
  misc_feature 1..20: note = B2M gRNA target site sequence
  source 1..20: mol_type = other DNA
tatgatgttttggtcaatga

SEQ ID NO: 1857 - DNA, 20 bp, synthetic construct
  misc_feature 1..20: note = B2M gRNA target site sequence
  source 1..20: mol_type = other DNA
atgatggactgtatatatga

SEQ ID NO: 1858 - DNA, 20 bp, synthetic construct
  misc_feature 1..20: note = B2M gRNA target site sequence
  source 1..20: mol_type = other DNA
atggactgtatatatgacag

SEQ ID NO: 1859 - DNA, 20 bp, synthetic construct
  misc_feature 1..20: note = B2M gRNA target site sequence
  source 1..20: mol_type = other DNA
atatatgacagtggtctcat

SEQ ID NO: 1860 - DNA, 20 bp, synthetic construct
  misc_feature 1..20: note = B2M gRNA target site sequence
  source 1..20: mol_type = other DNA
gtggtctcataagattaaaa

SEQ ID NO: 1861 - DNA, 20 bp, synthetic construct
  misc_feature 1..20: note = B2M gRNA target site sequence
  source 1..20: mol_type = other DNA
tttactgcaacttctatgtt

SEQ ID NO: 1862 - DNA, 20 bp, synthetic construct
  misc_feature 1..20: note = B2M gRNA target site sequence
  source 1..20: mol_type = other DNA
cattgtgttacaactgccca

SEQ ID NO: 1863 - DNA, 20 bp, synthetic construct
  misc_feature 1..20: note = B2M gRNA target site sequence
  source 1..20: mol_type = other DNA
ttacaactgcccacagtatt

SEQ ID NO: 1864 - DNA, 20 bp, synthetic construct
  misc_feature 1..20: note = B2M gRNA target site sequence
  source 1..20: mol_type = other DNA
actgcccacagtattcagta

SEQ ID NO: 1865 - DNA, 20 bp, synthetic construct
  misc_feature 1..20: note = B2M gRNA target site sequence
  source 1..20: mol_type = other DNA
cacagtattcagtacagtaa

SEQ ID NO: 1866 - DNA, 20 bp, synthetic construct
  misc_feature 1..20: note = B2M gRNA target site sequence
  source 1..20: mol_type = other DNA
acagtattcagtacagtaac

SEQ ID NO: 1867 - DNA, 20 bp, synthetic construct
  misc_feature 1..20: note = B2M gRNA target site sequence
  source 1..20: mol_type = other DNA
cagtacagtaacaggctgta

SEQ ID NO: 1868 - DNA, 20 bp, synthetic construct
  misc_feature 1..20: note = B2M gRNA target site sequence
  source 1..20: mol_type = other DNA
agtacagtaacaggctgtac

SEQ ID NO: 1869 - DNA, 20 bp, synthetic construct
  misc_feature 1..20: note = B2M gRNA target site sequence
  source 1..20: mol_type = other DNA
taacaggctgtacaggtttg

SEQ ID NO: 1870 - DNA, 20 bp, synthetic construct
  misc_feature 1..20: note = B2M gRNA target site sequence
  source 1..20: mol_type = other DNA
ggctgtacaggtttgtagtc

SEQ ID NO: 1871 - DNA, 20 bp, synthetic construct
  misc_feature 1..20: note = B2M gRNA target site sequence
  source 1..20: mol_type = other DNA
gctgtacaggtttgtagtct

SEQ ID NO: 1872 - DNA, 20 bp, synthetic construct
  misc_feature 1..20: note = B2M gRNA target site sequence
  source 1..20: mol_type = other DNA
tgtacaggtttgtagtctag

SEQ ID NO: 1873 - DNA, 20 bp, synthetic construct
  misc_feature 1..20: note = B2M gRNA target site sequence
  source 1..20: mol_type = other DNA
ggtttgtagtctaggagcaa

SEQ ID NO: 1874 - DNA, 20 bp, synthetic construct
  misc_feature 1..20: note = B2M gRNA target site sequence
  source 1..20: mol_type = other DNA
gtttgtagtctaggagcaat

SEQ ID NO: 1875 - DNA, 20 bp, synthetic construct
  misc_feature 1..20: note = B2M gRNA target site sequence
  source 1..20: mol_type = other DNA
gagcaataggctataccatg

SEQ ID NO: 1876 - DNA, 20 bp, synthetic construct
  misc_feature 1..20: note = B2M gRNA target site sequence
  source 1..20: mol_type = other DNA
taccatgtagcctatgcgtg

SEQ ID NO: 1877 - DNA, 20 bp, synthetic construct
  misc_feature 1..20: note = B2M gRNA target site sequence
  source 1..20: mol_type = other DNA
catgtagcctatgcgtgtag

SEQ ID NO: 1878 - DNA, 20 bp, synthetic construct
  misc_feature 1..20: note = B2M gRNA target site sequence
  source 1..20: mol_type = other DNA
atgtagcctatgcgtgtagt

SEQ ID NO: 1879 - DNA, 20 bp, synthetic construct
  misc_feature 1..20: note = B2M gRNA target site sequence
  source 1..20: mol_type = other DNA
gtgtagtaggctacaacacc

SEQ ID NO: 1880 - DNA, 20 bp, synthetic construct
  misc_feature 1..20: note = B2M gRNA target site sequence
  source 1..20: mol_type = other DNA
tgtagtaggctacaacacct

SEQ ID NO: 1881 - DNA, 20 bp, synthetic construct
  misc_feature 1..20: note = B2M gRNA target site sequence
  source 1..20: mol_type = other DNA
tacaacacctaggtttgtgt

SEQ ID NO: 1882 - DNA, 20 bp, synthetic construct
  misc_feature 1..20: note = B2M gRNA target site sequence
  source 1..20: mol_type = other DNA
aggtttgtgtaagcatttct

SEQ ID NO: 1883 - DNA, 20 bp, synthetic construct
  misc_feature 1..20: note = B2M gRNA target site sequence
  source 1..20: mol_type = other DNA
cagaacatgtccccgtcatt

SEQ ID NO: 1884 - DNA, 20 bp, synthetic construct
  misc_feature 1..20: note = B2M gRNA target site sequence
  source 1..20: mol_type = other DNA
taagtaacacatgactatat

SEQ ID NO: 1885 - DNA, 20 bp, synthetic construct
  misc_feature 1..20: note = B2M gRNA target site sequence
  source 1..20: mol_type = other DNA
agtaacacatgactatatta

SEQ ID NO: 1886 - DNA, 20 bp, synthetic construct
  misc_feature 1..20: note = B2M gRNA target site sequence
  source 1..20: mol_type = other DNA
cacatgactatattagagtt

SEQ ID NO: 1887 - DNA, 20 bp, synthetic construct
  misc_feature 1..20: note = B2M gRNA target site sequence
  source 1..20: mol_type = other DNA
acatgactatattagagttc

SEQ ID NO: 1888 - DNA, 20 bp, synthetic construct
  misc_feature 1..20: note = B2M gRNA target site sequence
  source 1..20: mol_type = other DNA
ctatattagagttcaggtcc

SEQ ID NO: 1889 - DNA, 20 bp, synthetic construct
  misc_feature 1..20: note = B2M gRNA target site sequence
  source 1..20: mol_type = other DNA
ctggctctacaatttactaa

SEQ ID NO: 1890 - DNA, 20 bp, synthetic construct
  misc_feature 1..20: note = B2M gRNA target site sequence
  source 1..20: mol_type = other DNA
caatttactaacagtgtgac

SEQ ID NO: 1891 - DNA, 20 bp, synthetic construct
  misc_feature 1..20: note = B2M gRNA target site sequence
  source 1..20: mol_type = other DNA
aatttactaacagtgtgact

SEQ ID NO: 1892 - DNA, 20 bp, synthetic construct
  misc_feature 1..20: note = B2M gRNA target site sequence
  source 1..20: mol_type = other DNA
ttactaacagtgtgactggg

SEQ ID NO: 1893 - DNA, 20 bp, synthetic construct
  misc_feature 1..20: note = B2M gRNA target site sequence
  source 1..20: mol_type = other DNA
cccaaatcaattccctgttc

SEQ ID NO: 1894 - DNA, 20 bp, synthetic construct
  misc_feature 1..20: note = B2M gRNA target site sequence
  source 1..20: mol_type = other DNA
ttccctgttctagaatataa

SEQ ID NO: 1895 - DNA, 20 bp, synthetic construct
  misc_feature 1..20: note = B2M gRNA target site sequence
  source 1..20: mol_type = other DNA
tccctgttctagaatataac

SEQ ID NO: 1896 - DNA, 20 bp, synthetic construct
  misc_feature 1..20: note = B2M gRNA target site sequence
  source 1..20: mol_type = other DNA
cctgttctagaatataacag

SEQ ID NO: 1897 - DNA, 20 bp, synthetic construct
  misc_feature 1..20: note = B2M gRNA target site sequence
  source 1..20: mol_type = other DNA
aatataacaggagatttgaa

SEQ ID NO: 1898 - DNA, 20 bp, synthetic construct
  misc_feature 1..20: note = B2M gRNA target site sequence
  source 1..20: mol_type = other DNA
atataacaggagatttgaat

SEQ ID NO: 1899 - DNA, 20 bp, synthetic construct
  misc_feature 1..20: note = B2M gRNA target site sequence
  source 1..20: mol_type = other DNA
tataacaggagatttgaatg

SEQ ID NO: 1900 - DNA, 20 bp, synthetic construct
  misc_feature 1..20: note = B2M gRNA target site sequence
  source 1..20: mol_type = other DNA
aggagatttgaatggggttt

SEQ ID NO: 1901 - DNA, 20 bp, synthetic construct
  misc_feature 1..20: note = B2M gRNA target site sequence
  source 1..20: mol_type = other DNA
gtttcagcatcaatgtaccc

SEQ ID NO: 1902 - DNA, 20 bp, synthetic construct
  misc_feature 1..20: note = B2M gRNA target site sequence
  source 1..20: mol_type = other DNA
tttcagcatcaatgtaccct

SEQ ID NO: 1903 - DNA, 20 bp, synthetic construct
  misc_feature 1..20: note = B2M gRNA target site sequence
  source 1..20: mol_type = other DNA
cagcatcaatgtaccctggg

SEQ ID NO: 1904 - DNA, 20 bp, synthetic construct
  misc_feature 1..20: note = B2M gRNA target site sequence
  source 1..20: mol_type = other DNA
catcaatgtaccctgggcag

SEQ ID NO: 1905 - DNA, 20 bp, synthetic construct
  misc_feature 1..20: note = B2M gRNA target site sequence
  source 1..20: mol_type = other DNA
ggcagtagaatttcattgaa

SEQ ID NO: 1906 - DNA, 20 bp, synthetic construct
  misc_feature 1..20: note = B2M gRNA target site sequence
  source 1..20: mol_type = other DNA
gaatttcattgaaaagcctt

SEQ ID NO: 1907 - DNA, 20 bp, synthetic construct
  misc_feature 1..20: note = B2M gRNA target site sequence
  source 1..20: mol_type = other DNA
aagcctttggactccaacta

SEQ ID NO: 1908 - DNA, 20 bp, synthetic construct
  misc_feature 1..20: note = B2M gRNA target site sequence
  source 1..20: mol_type = other DNA
ttggactccaactaaagatg

SEQ ID NO: 1909 - DNA, 20 bp, synthetic construct
  misc_feature 1..20: note = B2M gRNA target site sequence
  source 1..20: mol_type = other DNA
ggactccaactaaagatgca

SEQ ID NO: 1910 - DNA, 20 bp, synthetic construct
  misc_feature 1..20: note = B2M gRNA target site sequence
  source 1..20: mol_type = other DNA
ctccaactaaagatgcagag

SEQ ID NO: 1911 - DNA, 20 bp, synthetic construct
  misc_feature 1..20: note = B2M gRNA target site sequence
  source 1..20: mol_type = other DNA
ctaaagatgcagagaagtcc

SEQ ID NO: 1912 - DNA, 20 bp, synthetic construct
  misc_feature 1..20: note = B2M gRNA target site sequence
  source 1..20: mol_type = other DNA
tcctccctctctcttgcttc

SEQ ID NO: 1913 - DNA, 20 bp, synthetic construct
  misc_feature 1..20: note = B2M gRNA target site sequence
  source 1..20: mol_type = other DNA
ctccctctctcttgcttctg

SEQ ID NO: 1914 - DNA, 20 bp, synthetic construct
  misc_feature 1..20: note = B2M gRNA target site sequence
  source 1..20: mol_type = other DNA
cttgcttctggagctccttg

SEQ ID NO: 1915 - DNA, 20 bp, synthetic construct
  misc_feature 1..20: note = B2M gRNA target site sequence
  source 1..20: mol_type = other DNA
ccttgtagttacatctatta

SEQ ID NO: 1916 - DNA, 20 bp, synthetic construct
  misc_feature 1..20: note = B2M gRNA target site sequence
  source 1..20: mol_type = other DNA
tattatagtatcattatatc

SEQ ID NO: 1917 - DNA, 20 bp, synthetic construct
  misc_feature 1..20: note = B2M gRNA target site sequence
  source 1..20: mol_type = other DNA
ctgtttccctttatctcctc

SEQ ID NO: 1918 - DNA, 20 bp, synthetic construct
  misc_feature 1..20: note = B2M gRNA target site sequence
  source 1..20: mol_type = other DNA
tttccctttatctcctctag

SEQ ID NO: 1919 - DNA, 20 bp, synthetic construct
  misc_feature 1..20: note = B2M gRNA target site sequence
  source 1..20: mol_type = other DNA
ctttatctcctctagtggcc

SEQ ID NO: 1920 - DNA, 20 bp, synthetic construct
  misc_feature 1..20: note = B2M gRNA target site sequence
  source 1..20: mol_type = other DNA
tttatctcctctagtggcct

SEQ ID NO: 1921 - DNA, 20 bp, synthetic construct
  misc_feature 1..20: note = B2M gRNA target site sequence
  source 1..20: mol_type = other DNA
ctagtggcctgggaacctct

SEQ ID NO: 1922 - DNA, 20 bp, synthetic construct
  misc_feature 1..20: note = B2M gRNA target site sequence
  source 1..20: mol_type = other DNA
agtggcctgggaacctctaa

SEQ ID NO: 1923 - DNA, 20 bp, synthetic construct
  misc_feature 1..20: note = B2M gRNA target site sequence
  source 1..20: mol_type = other DNA
gtggcctgggaacctctaag

SEQ ID NO: 1924 - DNA, 20 bp, synthetic construct
  misc_feature 1..20: note = B2M gRNA target site sequence
  source 1..20: mol_type = other DNA
gaacctctaagaggcaaaca

SEQ ID NO: 1925 - DNA, 20 bp, synthetic construct
  misc_feature 1..20: note = B2M gRNA target site sequence
  source 1..20: mol_type = other DNA
aggcaaacacagtccccata

SEQ ID NO: 1926 - DNA, 20 bp, synthetic construct
  misc_feature 1..20: note = B2M gRNA target site sequence
  source 1..20: mol_type = other DNA
ggcaaacacagtccccatac

SEQ ID NO: 1927 - DNA, 20 bp, synthetic construct
  misc_feature 1..20: note = B2M gRNA target site sequence
  source 1..20: mol_type = other DNA
acacagtccccatacaggaa

SEQ ID NO: 1928 - DNA, 20 bp, synthetic construct
  misc_feature 1..20: note = B2M gRNA target site sequence
  source 1..20: mol_type = other DNA
cacagtccccatacaggaat

SEQ ID NO: 1929 - DNA, 20 bp, synthetic construct
  misc_feature 1..20: note = B2M gRNA target site sequence
  source 1..20: mol_type = other DNA
atacaggaatgggatgtctg

SEQ ID NO: 1930 - DNA, 20 bp, synthetic construct
  misc_feature 1..20: note = B2M gRNA target site sequence
  source 1..20: mol_type = other DNA
acaggaatgggatgtctgca

SEQ ID NO: 1931 - DNA, 20 bp, synthetic construct
  misc_feature 1..20: note = B2M gRNA target site sequence
  source 1..20: mol_type = other DNA
taactcctctcttctgtctg

SEQ ID NO: 1932 - DNA, 20 bp, synthetic construct
  misc_feature 1..20: note = B2M gRNA target site sequence
  source 1..20: mol_type = other DNA
gaataaaacaacattataca

SEQ ID NO: 1933 - DNA, 20 bp, synthetic construct
  misc_feature 1..20: note = B2M gRNA target site sequence
  source 1..20: mol_type = other DNA
aataaaacaacattatacaa

SEQ ID NO: 1934 - DNA, 20 bp, synthetic construct
  misc_feature 1..20: note = B2M gRNA target site sequence
  source 1..20: mol_type = other DNA
aacaacattatacaaaggaa

SEQ ID NO: 1935 - DNA, 20 bp, synthetic construct
  misc_feature 1..20: note = B2M gRNA target site sequence
  source 1..20: mol_type = other DNA
caacattatacaaaggaaaa

SEQ ID NO: 1936 - DNA, 20 bp, synthetic construct
  misc_feature 1..20: note = B2M gRNA target site sequence
  source 1..20: mol_type = other DNA
cattatacaaaggaaaagag

SEQ ID NO: 1937 - DNA, 20 bp, synthetic construct
  misc_feature 1..20: note = B2M gRNA target site sequence
  source 1..20: mol_type = other DNA
agtggttcattttctctcct

SEQ ID NO: 1938 - DNA, 20 bp, synthetic construct
  misc_feature 1..20: note = B2M gRNA target site sequence
  source 1..20: mol_type = other DNA
ggttcattttctctcctcag

SEQ ID NO: 1939 - DNA, 20 bp, synthetic construct
  misc_feature 1..20: note = B2M gRNA target site sequence
  source 1..20: mol_type = other DNA
ttcattttctctcctcagca

SEQ ID NO: 1940 - DNA, 20 bp, synthetic construct
  misc_feature 1..20: note = B2M gRNA target site sequence
  source 1..20: mol_type = other DNA
ctcagcagagatgtccaatg

SEQ ID NO: 1941 - DNA, 20 bp, synthetic construct
  misc_feature 1..20: note = B2M gRNA target site sequence
  source 1..20: mol_type = other DNA
agagatgtccaatgtggaaa

SEQ ID NO: 1942 - DNA, 20 bp, synthetic construct
  misc_feature 1..20: note = B2M gRNA target site sequence
  source 1..20: mol_type = other DNA
gatgtccaatgtggaaatgg

SEQ ID NO: 1943 - DNA, 20 bp, synthetic construct
  misc_feature 1..20: note = B2M gRNA target site sequence
  source 1..20: mol_type = other DNA
gtccaatgtggaaatggcag

SEQ ID NO: 1944 - DNA, 20 bp, synthetic construct
  misc_feature 1..20: note = B2M gRNA target site sequence
  source 1..20: mol_type = other DNA
aatgtggaaatggcagaaga

SEQ ID NO: 1945 - DNA, 20 bp, synthetic construct
  misc_feature 1..20: note = B2M gRNA target site sequence
  source 1..20: mol_type = other DNA
aaatggcagaagaaagatca

SEQ ID NO: 1946 - DNA, 20 bp, synthetic construct
  misc_feature 1..20: note = B2M gRNA target site sequence
  source 1..20: mol_type = other DNA
gaagaaagatcaaagccttg

SEQ ID NO: 1947 - DNA, 20 bp, synthetic construct
  misc_feature 1..20: note = B2M gRNA target site sequence
  source 1..20: mol_type = other DNA
aagaaagatcaaagccttgc

SEQ ID NO: 1948 - DNA, 20 bp, synthetic construct
  misc_feature 1..20: note = B2M gRNA target site sequence
  source 1..20: mol_type = other DNA
tcaaagccttgcaggtaatg

SEQ ID NO: 1949 - DNA, 20 bp, synthetic construct
  misc_feature 1..20: note = B2M gRNA target site sequence
  source 1..20: mol_type = other DNA
caaagccttgcaggtaatgt

SEQ ID NO: 1950 - DNA, 20 bp, synthetic construct
  misc_feature 1..20: note = B2M gRNA target site sequence
  source 1..20: mol_type = other DNA
tttatcctgcaataccatac

SEQ ID NO: 1951 - DNA, 20 bp, synthetic construct
  misc_feature 1..20: note = B2M gRNA target site sequence
  source 1..20: mol_type = other DNA
atcctgcaataccatactgg

SEQ ID NO: 1952 - DNA, 20 bp, synthetic construct
  misc_feature 1..20: note = B2M gRNA target site sequence
  source 1..20: mol_type = other DNA
cagttcctttgccctctctg

SEQ ID NO: 1953 - DNA, 20 bp, synthetic construct
  misc_feature 1..20: note = B2M gRNA target site sequence
  source 1..20: mol_type = other DNA
gttcctttgccctctctgta

SEQ ID NO: 1954 - DNA, 20 bp, synthetic construct
  misc_feature 1..20: note = B2M gRNA target site sequence
  source 1..20: mol_type = other DNA
ttcctttgccctctctgtag

SEQ ID NO: 1955 - DNA, 20 bp, synthetic construct
  misc_feature 1..20: note = B2M gRNA target site sequence
  source 1..20: mol_type = other DNA
tcctttgccctctctgtaga

SEQ ID NO: 1956 - DNA, 20 bp, synthetic construct
  misc_feature 1..20: note = B2M gRNA target site sequence
  source 1..20: mol_type = other DNA
ttgccctctctgtagagggt

SEQ ID NO: 1957 - DNA, 20 bp, synthetic construct
  misc_feature 1..20: note = B2M gRNA target site sequence
  source 1..20: mol_type = other DNA
tctgtagagggtcagtaata

SEQ ID NO: 1958 - DNA, 20 bp, synthetic construct
  misc_feature 1..20: note = B2M gRNA target site sequence
  source 1..20: mol_type = other DNA
gtcagtaatatggccatacc

SEQ ID NO: 1959 - DNA, 20 bp, synthetic construct
  misc_feature 1..20: note = B2M gRNA target site sequence
  source 1..20: mol_type = other DNA
tcagtaatatggccatacct

SEQ ID NO: 1960 - DNA, 20 bp, synthetic construct
  misc_feature 1..20: note = B2M gRNA target site sequence
  source 1..20: mol_type = other DNA
cagtaatatggccatacctg

SEQ ID NO: 1961 - DNA, 20 bp, synthetic construct
  misc_feature 1..20: note = B2M gRNA target site sequence
  source 1..20: mol_type = other DNA
accttcttcatgccactcca

SEQ ID NO: 1962 - DNA, 20 bp, synthetic construct
  misc_feature 1..20: note = B2M gRNA target site sequence
  source 1..20: mol_type = other DNA
ccttcttcatgccactccac

SEQ ID NO: 1963 - DNA, 20 bp, synthetic construct
  misc_feature 1..20: note = B2M gRNA target site sequence
  source 1..20: mol_type = other DNA
ttcttcatgccactccacag

SEQ ID NO: 1964 - DNA, 20 bp, synthetic construct
  misc_feature 1..20: note = B2M gRNA target site sequence
  source 1..20: mol_type = other DNA
ttcatgccactccacaggag

SEQ ID NO: 1965 - DNA, 20 bp, synthetic construct
  misc_feature 1..20: note = B2M gRNA target site sequence
  source 1..20: mol_type = other DNA
tcatgccactccacaggaga

SEQ ID NO: 1966 - DNA, 20 bp, synthetic construct
  misc_feature 1..20: note = B2M gRNA target site sequence
  source 1..20: mol_type = other DNA
catgccactccacaggagaa

SEQ ID NO: 1967 - DNA, 20 bp, synthetic construct
  misc_feature 1..20: note = B2M gRNA target site sequence
  source 1..20: mol_type = other DNA
gagaagggaacatgaccctg

SEQ ID NO: 1968 - DNA, 20 bp, synthetic construct
  misc_feature 1..20: note = B2M gRNA target site sequence
  source 1..20: mol_type = other DNA
agaagggaacatgaccctgt

SEQ ID NO: 1969 - DNA, 20 bp, synthetic construct
  misc_feature 1..20: note = B2M gRNA target site sequence
  source 1..20: mol_type = other DNA
ctctgtcaatgttctccaca

SEQ ID NO: 1970 - DNA, 20 bp, synthetic construct
  misc_feature 1..20: note = B2M gRNA target site sequence
  source 1..20: mol_type = other DNA
gtcaatgttctccacatagt

SEQ ID NO: 1971 - DNA, 20 bp, synthetic construct
  misc_feature 1..20: note = B2M gRNA target site sequence
  source 1..20: mol_type = other DNA
tcaatgttctccacatagtg

SEQ ID NO: 1972 - DNA, 20 bp, synthetic construct
  misc_feature 1..20: note = B2M gRNA target site sequence
  source 1..20: mol_type = other DNA
caatgttctccacatagtga

SEQ ID NO: 1973 - DNA, 20 bp, synthetic construct
  misc_feature 1..20: note = B2M gRNA target site sequence
  source 1..20: mol_type = other DNA
catagtgagggttatcatgt

SEQ ID NO: 1974 - DNA, 20 bp, synthetic construct
  misc_feature 1..20: note = B2M gRNA target site sequence
  source 1..20: mol_type = other DNA
tagtgagggttatcatgtta

SEQ ID NO: 1975 - DNA, 20 bp, synthetic construct
  misc_feature 1..20: note = B2M gRNA target site sequence
  source 1..20: mol_type = other DNA
atgttagagctgtctataaa

SEQ ID NO: 1976 - DNA, 20 bp, synthetic construct
  misc_feature 1..20: note = B2M gRNA target site sequence
  source 1..20: mol_type = other DNA
agctgtctataaatagtcct

SEQ ID NO: 1977 - DNA, 20 bp, synthetic construct
  misc_feature 1..20: note = B2M gRNA target site sequence
  source 1..20: mol_type = other DNA
gctgtctataaatagtcctc

SEQ ID NO: 1978 - DNA, 20 bp, synthetic construct
  misc_feature 1..20: note = B2M gRNA target site sequence
  source 1..20: mol_type = other DNA
tctataaatagtcctcagga

SEQ ID NO: 1979 - DNA, 20 bp, synthetic construct
  misc_feature 1..20: note = B2M gRNA target site sequence
  source 1..20: mol_type = other DNA
tgaaacaaaaacattttctc

SEQ ID NO: 1980 - DNA, 20 bp, synthetic construct
  misc_feature 1..20: note = B2M gRNA target site sequence
  source 1..20: mol_type = other DNA
gaaacaaaaacattttctca

SEQ ID NO: 1981 - DNA, 20 bp, synthetic construct
  misc_feature 1..20: note = B2M gRNA target site sequence
  source 1..20: mol_type = other DNA
acatgtctcgatctatgaaa

SEQ ID NO: 1982 - DNA, 20 bp, synthetic construct
  misc_feature 1..20: note = B2M gRNA target site sequence
  source 1..20: mol_type = other DNA
gtctcgatctatgaaaaaga

SEQ ID NO: 1983 - DNA, 20 bp, synthetic construct
  misc_feature 1..20: note = B2M gRNA target site sequence
  source 1..20: mol_type = other DNA
tcgatctatgaaaaagacag

SEQ ID NO: 1984 - DNA, 20 bp, synthetic construct
  misc_feature 1..20: note = B2M gRNA target site sequence
  source 1..20: mol_type = other DNA
gatctatgaaaaagacagtg

SEQ ID NO: 1985 - DNA, 20 bp, synthetic construct
  misc_feature 1..20: note = B2M gRNA target site sequence
  source 1..20: mol_type = other DNA
aaaagacagtggagaaaaaa

SEQ ID NO: 1986 - DNA, 20 bp, synthetic construct
  misc_feature 1..20: note = B2M gRNA target site sequence
  source 1..20: mol_type = other DNA
aaagacagtggagaaaaaaa

SEQ ID NO: 1987 - DNA, 20 bp, synthetic construct
  misc_feature 1..20: note = B2M gRNA target site sequence
  source 1..20: mol_type = other DNA
gacagtggagaaaaaaaagg

SEQ ID NO: 1988 - DNA, 20 bp, synthetic construct
  misc_feature 1..20: note = B2M gRNA target site sequence
  source 1..20: mol_type = other DNA
agaaaaaaaaggaagacatt

SEQ ID NO: 1989 - DNA, 20 bp, synthetic construct
  misc_feature 1..20: note = B2M gRNA target site sequence
  source 1..20: mol_type = other DNA
gtactaacaaatgtctaaaa

SEQ ID NO: 1990 - DNA, 20 bp, synthetic construct
  misc_feature 1..20: note = B2M gRNA target site sequence
  source 1..20: mol_type = other DNA
taacaaatgtctaaaatggt

SEQ ID NO: 1991 - DNA, 20 bp, synthetic construct
  misc_feature 1..20: note = B2M gRNA target site sequence
  source 1..20: mol_type = other DNA
tgtctaaaatggttagaaat

SEQ ID NO: 1992 - DNA, 20 bp, synthetic construct
  misc_feature 1..20: note = B2M gRNA target site sequence
  source 1..20: mol_type = other DNA
gtctaaaatggttagaaata

SEQ ID NO: 1993 - DNA, 20 bp, synthetic construct
  misc_feature 1..20: note = B2M gRNA target site sequence
  source 1..20: mol_type = other DNA
aaaatggttagaaataaggc

SEQ ID NO: 1994 - DNA, 20 bp, synthetic construct
  misc_feature 1..20: note = B2M gRNA target site sequence
  source 1..20: mol_type = other DNA
atggttagaaataaggctgg

SEQ ID NO: 1995 - DNA, 20 bp, synthetic construct
  misc_feature 1..20: note = B2M gRNA target site sequence
  source 1..20: mol_type = other DNA
tagaaataaggctggcagaa

SEQ ID NO: 1996 - DNA, 20 bp, synthetic construct
  misc_feature 1..20: note = B2M gRNA target site sequence
  source 1..20: mol_type = other DNA
agaaataaggctggcagaat

SEQ ID NO: 1997 - DNA, 20 bp, synthetic construct
  misc_feature 1..20: note = B2M gRNA target site sequence
  source 1..20: mol_type = other DNA
ctacccatgaatacattgtt

SEQ ID NO: 1998 - DNA, 20 bp, synthetic construct
  misc_feature 1..20: note = B2M gRNA target site sequence
  source 1..20: mol_type = other DNA
acccatgaatacattgttta

SEQ ID NO: 1999 - DNA, 20 bp, synthetic construct
  misc_feature 1..20: note = B2M gRNA target site sequence
  source 1..20: mol_type = other DNA
atacattgtttagagctacc

SEQ ID NO: 2000 - DNA, 20 bp, synthetic construct
  misc_feature 1..20: note = B2M gRNA target site sequence
  source 1..20: mol_type = other DNA
cattgtttagagctacccag

SEQ ID NO: 2001 - DNA, 20 bp, synthetic construct
  misc_feature 1..20: note = B2M gRNA target site sequence
  source 1..20: mol_type = other DNA
attgtttagagctacccagc

SEQ ID NO: 2002 - DNA, 20 bp, synthetic construct
  misc_feature 1..20: note = B2M gRNA target site sequence
  source 1..20: mol_type = other DNA
tagagctacccagcaggaac

SEQ ID NO: 2003 - DNA, 20 bp, synthetic construct
  misc_feature 1..20: note = B2M gRNA target site sequence
  source 1..20: mol_type = other DNA
caggaacaagcccttcctac

SEQ ID NO: 2004 - DNA, 20 bp, synthetic construct
  misc_feature 1..20: note = B2M gRNA target site sequence
  source 1..20: mol_type = other DNA
caagcccttcctactagcct

SEQ ID NO: 2005 - DNA, 20 bp, synthetic construct
  misc_feature 1..20: note = B2M gRNA target site sequence
  source 1..20: mol_type = other DNA
actagcctcagataccaatc

SEQ ID NO: 2006 - DNA, 20 bp, synthetic construct
  misc_feature 1..20: note = B2M gRNA target site sequence
  source 1..20: mol_type = other DNA
gcctcagataccaatccagc

SEQ ID NO: 2007 - DNA, 20 bp, synthetic construct
  misc_feature 1..20: note = B2M gRNA target site sequence
  source 1..20: mol_type = other DNA
cagataccaatccagccaga

SEQ ID NO: 2008 - DNA, 20 bp, synthetic construct
  misc_feature 1..20: note = B2M gRNA target site sequence
  source 1..20: mol_type = other DNA
ccaatccagccagaaagtac

SEQ ID NO: 2009 - DNA, 20 bp, synthetic construct
  misc_feature 1..20: note = B2M gRNA target site sequence
  source 1..20: mol_type = other DNA
aatccagccagaaagtactg

SEQ ID NO: 2010 - DNA, 20 bp, synthetic construct
  misc_feature 1..20: note = B2M gRNA target site sequence
  source 1..20: mol_type = other DNA
ccagccagaaagtactggag

SEQ ID NO: 2011 - DNA, 20 bp, synthetic construct
  misc_feature 1..20: note = B2M gRNA target site sequence
  source 1..20: mol_type = other DNA
cagaaagtactggagaagtc

SEQ ID NO: 2012 - DNA, 20 bp, synthetic construct
  misc_feature 1..20: note = B2M gRNA target site sequence
  source 1..20: mol_type = other DNA
agaaagtactggagaagtcc

SEQ ID NO: 2013 - DNA, 20 bp, synthetic construct
  misc_feature 1..20: note = B2M gRNA target site sequence
  source 1..20: mol_type = other DNA
actggagaagtccaggatta

SEQ ID NO: 2014 - DNA, 20 bp, synthetic construct
  misc_feature 1..20: note = B2M gRNA target site sequence
  source 1..20: mol_type = other DNA
ctggagaagtccaggattat

SEQ ID NO: 2015 - DNA, 20 bp, synthetic construct
  misc_feature 1..20: note = B2M gRNA target site sequence
  source 1..20: mol_type = other DNA
agtccaggattataggatgc

SEQ ID NO: 2016 - DNA, 20 bp, synthetic construct
  misc_feature 1..20: note = B2M gRNA target site sequence
  source 1..20: mol_type = other DNA
gtccaggattataggatgct

SEQ ID NO: 2017 - DNA, 20 bp, synthetic construct
  misc_feature 1..20: note = B2M gRNA target site sequence
  source 1..20: mol_type = other DNA
aggattataggatgctagga

SEQ ID NO: 2018 - DNA, 20 bp, synthetic construct
  misc_feature 1..20: note = B2M gRNA target site sequence
  source 1..20: mol_type = other DNA
attataggatgctaggacag

SEQ ID NO: 2019 - DNA, 20 bp, synthetic construct
  misc_feature 1..20: note = B2M gRNA target site sequence
  source 1..20: mol_type = other DNA
ttataggatgctaggacagc

SEQ ID NO: 2020 - DNA, 20 bp, synthetic construct
  misc_feature 1..20: note = B2M gRNA target site sequence
  source 1..20: mol_type = other DNA
gacagcaggacttacaaaca

SEQ ID NO: 2021 - DNA, 20 bp, synthetic construct
  misc_feature 1..20: note = B2M gRNA target site sequence
  source 1..20: mol_type = other DNA
acagcaggacttacaaacaa

SEQ ID NO: 2022 - DNA, 20 bp, synthetic construct
  misc_feature 1..20: note = B2M gRNA target site sequence
  source 1..20: mol_type = other DNA
acaaaggcctataccttctt

SEQ ID NO: 2023 - DNA, 20 bp, synthetic construct
  misc_feature 1..20: note = B2M gRNA target site sequence
  source 1..20: mol_type = other DNA
accttcttgagatgttcgtt

SEQ ID NO: 2024 - DNA, 20 bp, synthetic construct
  misc_feature 1..20: note = B2M gRNA target site sequence
  source 1..20: mol_type = other DNA
ttcagtgctaaatatacctg

SEQ ID NO: 2025 - DNA, 20 bp, synthetic construct
  misc_feature 1..20: note = B2M gRNA target site sequence
  source 1..20: mol_type = other DNA
tatacctgaagctgccacaa

SEQ ID NO: 2026 - DNA, 20 bp, synthetic construct
  misc_feature 1..20: note = B2M gRNA target site sequence
  source 1..20: mol_type = other DNA
cctgaagctgccacaaaagc

SEQ ID NO: 2027 - DNA, 20 bp, synthetic construct
  misc_feature 1..20: note = B2M gRNA target site sequence
  source 1..20: mol_type = other DNA
tgaagctgccacaaaagcta

SEQ ID NO: 2028 - DNA, 20 bp, synthetic construct
  misc_feature 1..20: note = B2M gRNA target site sequence
  source 1..20: mol_type = other DNA
gaagctgccacaaaagctag

SEQ ID NO: 2029 - DNA, 20 bp, synthetic construct
  misc_feature 1..20: note = B2M gRNA target site sequence
  source 1..20: mol_type = other DNA
gctgccacaaaagctagagg

SEQ ID NO: 2030 - DNA, 20 bp, synthetic construct
  misc_feature 1..20: note = B2M gRNA target site sequence
  source 1..20: mol_type = other DNA
ccacaaaagctagaggaagc

SEQ ID NO: 2031 - DNA, 20 bp, synthetic construct
  misc_feature 1..20: note = B2M gRNA target site sequence
  source 1..20: mol_type = other DNA
caaaagctagaggaagccag

SEQ ID NO: 2032 - DNA, 20 bp, synthetic construct
  misc_feature 1..20: note = B2M gRNA target site sequence
  source 1..20: mol_type = other DNA
aaaagctagaggaagccagt

SEQ ID NO: 2033 - DNA, 20 bp, synthetic construct
  misc_feature 1..20: note = B2M gRNA target site sequence
  source 1..20: mol_type = other DNA
gctagaggaagccagtaggt

SEQ ID NO: 2034 - DNA, 20 bp, synthetic construct
  misc_feature 1..20: note = B2M gRNA target site sequence
  source 1..20: mol_type = other DNA
agaggaagccagtaggtaag

SEQ ID NO: 2035 - DNA, 20 bp, synthetic construct
  misc_feature 1..20: note = B2M gRNA target site sequence
  source 1..20: mol_type = other DNA
gccagtaggtaagaagtgtt

SEQ ID NO: 2036 - DNA, 20 bp, synthetic construct
  misc_feature 1..20: note = B2M gRNA target site sequence
  source 1..20: mol_type = other DNA
cagtaggtaagaagtgttaa

SEQ ID NO: 2037 - DNA, 20 bp, synthetic construct
  misc_feature 1..20: note = B2M gRNA target site sequence
  source 1..20: mol_type = other DNA
gagtgtatatgtatttgtgc

SEQ ID NO: 2038 - DNA, 20 bp, synthetic construct
  misc_feature 1..20: note = B2M gRNA target site sequence
  source 1..20: mol_type = other DNA
tgctgctccctgctcaactg

SEQ ID NO: 2039 - DNA, 20 bp, synthetic construct
  misc_feature 1..20: note = B2M gRNA target site sequence
  source 1..20: mol_type = other DNA
gctgctccctgctcaactgc

SEQ ID NO: 2040 - DNA, 20 bp, synthetic construct
  misc_feature 1..20: note = B2M gRNA target site sequence
  source 1..20: mol_type = other DNA
ctgctccctgctcaactgca

SEQ ID NO: 2041 - DNA, 20 bp, synthetic construct
  misc_feature 1..20: note = B2M gRNA target site sequence
  source 1..20: mol_type = other DNA
ctcaactgcagggaaactac

SEQ ID NO: 2042 - DNA, 20 bp, synthetic construct
  misc_feature 1..20: note = B2M gRNA target site sequence
  source 1..20: mol_type = other DNA
ctgcagggaaactactggtt

SEQ ID NO: 2043 - DNA, 20 bp, synthetic construct
  misc_feature 1..20: note = B2M gRNA target site sequence
  source 1..20: mol_type = other DNA
tcagaaaccatgctgtgcat

SEQ ID NO: 2044 - DNA, 20 bp, synthetic construct
  misc_feature 1..20: note = B2M gRNA target site sequence
  source 1..20: mol_type = other DNA
catgctgtgcatcagtatct

SEQ ID NO: 2045 - DNA, 20 bp, synthetic construct
  misc_feature 1..20: note = B2M gRNA target site sequence
  source 1..20: mol_type = other DNA
gctgtgcatcagtatctcag

SEQ ID NO: 2046 - DNA, 20 bp, synthetic construct
  misc_feature 1..20: note = B2M gRNA target site sequence
  source 1..20: mol_type = other DNA
ctgtgcatcagtatctcagc

SEQ ID NO: 2047 - DNA, 20 bp, synthetic construct
  misc_feature 1..20: note = B2M gRNA target site sequence
  source 1..20: mol_type = other DNA
gtgccactaatctgatcttt

SEQ ID NO: 2048 - DNA, 20 bp, synthetic construct
  misc_feature 1..20: note = B2M gRNA target site sequence
  source 1..20: mol_type = other DNA
tccctgacaatcccaatatg

SEQ ID NO: 2049 - DNA, 20 bp, synthetic construct
  misc_feature 1..20: note = B2M gRNA target site sequence
  source 1..20: mol_type = other DNA
aatatgcagattgtttatat

SEQ ID NO: 2050 - DNA, 20 bp, synthetic construct
  misc_feature 1..20: note = B2M gRNA target site sequence
  source 1..20: mol_type = other DNA
tgcagattgtttatatcaga

SEQ ID NO: 2051 - DNA, 20 bp, synthetic construct
  misc_feature 1..20: note = B2M gRNA target site sequence
  source 1..20: mol_type = other DNA
gcagattgtttatatcagat

SEQ ID NO: 2052 - DNA, 20 bp, synthetic construct
  misc_feature 1..20: note = B2M gRNA target site sequence
  source 1..20: mol_type = other DNA
attgtttatatcagatggga

SEQ ID NO: 2053 - DNA, 20 bp, synthetic construct
  misc_feature 1..20: note = B2M gRNA target site sequence
  source 1..20: mol_type = other DNA
ttgtttatatcagatgggat

SEQ ID NO: 2054 - DNA, 20 bp, synthetic construct
  misc_feature 1..20: note = B2M gRNA target site sequence
  source 1..20: mol_type = other DNA
cagatgggatgggactcatt

SEQ ID NO: 2055 - DNA, 20 bp, synthetic construct
  misc_feature 1..20: note = B2M gRNA target site sequence
  source 1..20: mol_type = other DNA
agatgggatgggactcattc

SEQ ID NO: 2056 - DNA, 20 bp, synthetic construct
  misc_feature 1..20: note = B2M gRNA target site sequence
  source 1..20: mol_type = other DNA
gatgggatgggactcattca

SEQ ID NO: 2057 - DNA, 20 bp, synthetic construct
  misc_feature 1..20: note = B2M gRNA target site sequence
  source 1..20: mol_type = other DNA
gggatgggactcattcaggg

SEQ ID NO: 2058 - DNA, 20 bp, synthetic construct
  misc_feature 1..20: note = B2M gRNA target site sequence
  source 1..20: mol_type = other DNA
gggactcattcagggtagta

SEQ ID NO: 2059 - DNA, 20 bp, synthetic construct
  misc_feature 1..20: note = B2M gRNA target site sequence
  source 1..20: mol_type = other DNA
cattcagggtagtatggcca

SEQ ID NO: 2060 - DNA, 20 bp, synthetic construct
  misc_feature 1..20: note = B2M gRNA target site sequence
  source 1..20: mol_type = other DNA
catagaccttttttatatca

SEQ ID NO: 2061 - DNA, 20 bp, synthetic construct
  misc_feature 1..20: note = B2M gRNA target site sequence
  source 1..20: mol_type = other DNA
agaccttttttatatcaaag

SEQ ID NO: 2062 - DNA, 20 bp, synthetic construct
  misc_feature 1..20: note = B2M gRNA target site sequence
  source 1..20: mol_type = other DNA
gactactcatacacaacttt

SEQ ID NO: 2063 - DNA, 20 bp, synthetic construct
  misc_feature 1..20: note = B2M gRNA target site sequence
  source 1..20: mol_type = other DNA
tactcatacacaactttcag

SEQ ID NO: 2064 - DNA, 20 bp, synthetic construct
  misc_feature 1..20: note = B2M gRNA target site sequence
  source 1..20: mol_type = other DNA
caactttcagcagcttacaa

SEQ ID NO: 2065 - DNA, 20 bp, synthetic construct
  misc_feature 1..20: note = B2M gRNA target site sequence
  source 1..20: mol_type = other DNA
agcagcttacaaaagaatgt

SEQ ID NO: 2066 - DNA, 20 bp, synthetic construct
  misc_feature 1..20: note = B2M gRNA target site sequence
  source 1..20: mol_type = other DNA
cttaccccacttaactatct

SEQ ID NO: 2067 - DNA, 20 bp, synthetic construct
  misc_feature 1..20: note = B2M gRNA target site sequence
  source 1..20: mol_type = other DNA
ttaccccacttaactatctt

SEQ ID NO: 2068 - DNA, 20 bp, synthetic construct
  misc_feature 1..20: note = B2M gRNA target site sequence
  source 1..20: mol_type = other DNA
aactatcttgggctgtgaca

SEQ ID NO: 2069 - DNA, 20 bp, synthetic construct
  misc_feature 1..20: note = B2M gRNA target site sequence
  source 1..20: mol_type = other DNA
tgggctgtgacaaagtcaca

SEQ ID NO: 2070 - DNA, 20 bp, synthetic construct
  misc_feature 1..20: note = B2M gRNA target site sequence
  source 1..20: mol_type = other DNA
acaaagtcacatggttcaca

SEQ ID NO: 2071 - DNA, 20 bp, synthetic construct
  misc_feature 1..20: note = B2M gRNA target site sequence
  source 1..20: mol_type = other DNA
aagtcacatggttcacacgg

SEQ ID NO: 2072 - DNA, 20 bp, synthetic construct
  misc_feature 1..20: note = B2M gRNA target site sequence
  source 1..20: mol_type = other DNA
agtcacatggttcacacggc

SEQ ID NO: 2073 - DNA, 20 bp, synthetic construct
  misc_feature 1..20: note = B2M gRNA target site sequence
  source 1..20: mol_type = other DNA
gcaggcatactcatcttttt

SEQ ID NO: 2074 - DNA, 20 bp, synthetic construct
  misc_feature 1..20: note = B2M gRNA target site sequence
  source 1..20: mol_type = other DNA
ggcatactcatctttttcag

SEQ ID NO: 2075 - DNA, 20 bp, synthetic construct
  misc_feature 1..20: note = B2M gRNA target site sequence
  source 1..20: mol_type = other DNA
gcatactcatctttttcagt

SEQ ID NO: 2076 - DNA, 20 bp, synthetic construct
  misc_feature 1..20: note = B2M gRNA target site sequence
  source 1..20: mol_type = other DNA
catactcatctttttcagtg

SEQ ID NO: 2077 - DNA, 20 bp, synthetic construct
  misc_feature 1..20: note = B2M gRNA target site sequence
  source 1..20: mol_type = other DNA
atactcatctttttcagtgg

SEQ ID NO: 2078 - DNA, 20 bp, synthetic construct
  misc_feature 1..20: note = B2M gRNA target site sequence
  source 1..20: mol_type = other DNA
tttttcagtgggggtgaatt

SEQ ID NO: 2079 - DNA, 20 bp, synthetic construct
  misc_feature 1..20: note = B2M gRNA target site sequence
  source 1..20: mol_type = other DNA
cagtgggggtgaattcagtg

SEQ ID NO: 2080 - DNA, 20 bp, synthetic construct
  misc_feature 1..20: note = B2M gRNA target site sequence
  source 1..20: mol_type = other DNA
gggtgaattcagtgtagtac

SEQ ID NO: 2081 - DNA, 20 bp, synthetic construct
  misc_feature 1..20: note = B2M gRNA target site sequence
  source 1..20: mol_type = other DNA
gtgaattcagtgtagtacaa

SEQ ID NO: 2082 - DNA, 20 bp, synthetic construct
  misc_feature 1..20: note = B2M gRNA target site sequence
  source 1..20: mol_type = other DNA
attcagtgtagtacaagaga

SEQ ID NO: 2083 - DNA, 20 bp, synthetic construct
  misc_feature 1..20: note = B2M gRNA target site sequence
  source 1..20: mol_type = other DNA
agtgtagtacaagagataga

SEQ ID NO: 2084 - DNA, 20 bp, synthetic construct
  misc_feature 1..20: note = B2M gRNA target site sequence
  source 1..20: mol_type = other DNA
agtacaagagatagaaagac

SEQ ID NO: 2085 - DNA, 20 bp, synthetic construct
  misc_feature 1..20: note = B2M gRNA target site sequence
  source 1..20: mol_type = other DNA
gaaagaccagtccttgctga

SEQ ID NO: 2086 - DNA, 20 bp, synthetic construct
  misc_feature 1..20: note = B2M gRNA target site sequence
  source 1..20: mol_type = other DNA
accagtccttgctgaaagac

SEQ ID NO: 2087 - DNA, 20 bp, synthetic construct
  misc_feature 1..20: note = B2M gRNA target site sequence
  source 1..20: mol_type = other DNA
tcaattctctctccattctt

SEQ ID NO: 2088 - DNA, 20 bp, synthetic construct
  misc_feature 1..20: note = B2M gRNA target site sequence
  source 1..20: mol_type = other DNA
ttctctctccattcttcagt

SEQ ID NO: 2089 - DNA, 20 bp, synthetic construct
  misc_feature 1..20: note = B2M gRNA target site sequence
  source 1..20: mol_type = other DNA
cagtaagtcaacttcaatgt

SEQ ID NO: 2090 - DNA, 20 bp, synthetic construct
  misc_feature 1..20: note = B2M gRNA target site sequence
  source 1..20: mol_type = other DNA
aagtcaacttcaatgtcgga

SEQ ID NO: 2091 - DNA, 20 bp, synthetic construct
  misc_feature 1..20: note = B2M gRNA target site sequence
  source 1..20: mol_type = other DNA
aatgtcggatggatgaaacc

SEQ ID NO: 2092 - DNA, 20 bp, synthetic construct
  misc_feature 1..20: note = B2M gRNA target site sequence
  source 1..20: mol_type = other DNA
atggatgaaacccagacaca

SEQ ID NO: 2093 - DNA, 20 bp, synthetic construct
  misc_feature 1..20: note = B2M gRNA target site sequence
  source 1..20: mol_type = other DNA
aacccagacacatagcaatt

SEQ ID NO: 2094 - DNA, 20 bp, synthetic construct
  misc_feature 1..20: note = B2M gRNA target site sequence
  source 1..20: mol_type = other DNA
acccagacacatagcaattc

SEQ ID NO: 2095 - DNA, 20 bp, synthetic construct
  misc_feature 1..20: note = B2M gRNA target site sequence
  source 1..20: mol_type = other DNA
tttgactttccattctctgc

SEQ ID NO: 2096 - DNA, 20 bp, synthetic construct
  misc_feature 1..20: note = B2M gRNA target site sequence
  source 1..20: mol_type = other DNA
cattctctgctggatgacgt

SEQ ID NO: 2097 - DNA, 20 bp, synthetic construct
  misc_feature 1..20: note = B2M gRNA target site sequence
  source 1..20: mol_type = other DNA
cgtgagtaaacctgaatctt

SEQ ID NO: 2098 - DNA, 20 bp, synthetic construct
  misc_feature 1..20: note = B2M gRNA target site sequence
  source 1..20: mol_type = other DNA
tgagtaaacctgaatctttg

SEQ ID NO: 2099 - DNA, 20 bp, synthetic construct
  misc_feature 1..20: note = B2M gRNA target site sequence
  source 1..20: mol_type = other DNA
cctgaatctttggagtacct

SEQ ID NO: 2100 - DNA, 20 bp, synthetic construct
  misc_feature 1..20: note = B2M gRNA target site sequence
  source 1..20: mol_type = other DNA
ctgaatctttggagtacctg

SEQ ID NO: 2101 - DNA, 20 bp, synthetic construct
  misc_feature 1..20: note = B2M gRNA target site sequence
  source 1..20: mol_type = other DNA
ttggagtacctgaggaatat

SEQ ID NO: 2102 - DNA, 20 bp, synthetic construct
  misc_feature 1..20: note = B2M gRNA target site sequence
  source 1..20: mol_type = other DNA
tggagtacctgaggaatatc

SEQ ID NO: 2103 - DNA, 20 bp, synthetic construct
  misc_feature 1..20: note = B2M gRNA target site sequence
  source 1..20: mol_type = other DNA
tacctgaggaatatcgggaa

SEQ ID NO: 2104 - DNA, 20 bp, synthetic construct
  misc_feature 1..20: note = B2M gRNA target site sequence
  source 1..20: mol_type = other DNA
aaaagacacattaatattgc

SEQ ID NO: 2105 - DNA, 20 bp, synthetic construct
  misc_feature 1..20: note = B2M gRNA target site sequence
  source 1..20: mol_type = other DNA
aaagacacattaatattgcc

SEQ ID NO: 2106 - DNA, 20 bp, synthetic construct
  misc_feature 1..20: note = B2M gRNA target site sequence
  source 1..20: mol_type = other DNA
aagacacattaatattgcca

SEQ ID NO: 2107 - DNA, 20 bp, synthetic construct
  misc_feature 1..20: note = B2M gRNA target site sequence
  source 1..20: mol_type = other DNA
tattgccagggtatttcact

SEQ ID NO: 2108 - DNA, 20 bp, synthetic construct
  misc_feature 1..20: note = B2M gRNA target site sequence
  source 1..20: mol_type = other DNA
attgccagggtatttcactt

SEQ ID NO: 2109 - DNA, 20 bp, synthetic construct
  misc_feature 1..20: note = B2M gRNA target site sequence
  source 1..20: mol_type = other DNA
ttgccagggtatttcacttg

SEQ ID NO: 2110 - DNA, 20 bp, synthetic construct
  misc_feature 1..20: note = B2M gRNA target site sequence
  source 1..20: mol_type = other DNA
tatttcacttggggctaact

SEQ ID NO: 2111 - DNA, 20 bp, synthetic construct
  misc_feature 1..20: note = B2M gRNA target site sequence
  source 1..20: mol_type = other DNA
cttggggctaacttggtgtc

SEQ ID NO: 2112 - DNA, 20 bp, synthetic construct
  misc_feature 1..20: note = B2M gRNA target site sequence
  source 1..20: mol_type = other DNA
aacttggtgtcaagctatat

SEQ ID NO: 2113 - DNA, 20 bp, synthetic construct
  misc_feature 1..20: note = B2M gRNA target site sequence
  source 1..20: mol_type = other DNA
acttggtgtcaagctatatc

SEQ ID NO: 2114 - DNA, 20 bp, synthetic construct
  misc_feature 1..20: note = B2M gRNA target site sequence
  source 1..20: mol_type = other DNA
gtcaagctatatcaggcacc

SEQ ID NO: 2115 - DNA, 20 bp, synthetic construct
  misc_feature 1..20: note = B2M gRNA target site sequence
  source 1..20: mol_type = other DNA
aggcaccaagtgtttacatt

SEQ ID NO: 2116 - DNA, 20 bp, synthetic construct
  misc_feature 1..20: note = B2M gRNA target site sequence
  source 1..20: mol_type = other DNA
tcccaattccatttccactc

SEQ ID NO: 2117 - DNA, 20 bp, synthetic construct
  misc_feature 1..20: note = B2M gRNA target site sequence
  source 1..20: mol_type = other DNA
catttccactctggccaaat

SEQ ID NO: 2118 - DNA, 20 bp, synthetic construct
  misc_feature 1..20: note = B2M gRNA target site sequence
  source 1..20: mol_type = other DNA
tgagcttccaccttcccaac

SEQ ID NO: 2119 - DNA, 20 bp, synthetic construct
  misc_feature 1..20: note = B2M gRNA target site sequence
  source 1..20: mol_type = other DNA
aacaagccacctccattttg

SEQ ID NO: 2120 - DNA, 20 bp, synthetic construct
  misc_feature 1..20: note = B2M gRNA target site sequence
  source 1..20: mol_type = other DNA
ttgaagaataaaccgtgact

SEQ ID NO: 2121 - DNA, 20 bp, synthetic construct
  misc_feature 1..20: note = B2M gRNA target site sequence
  source 1..20: mol_type = other DNA
tgccttttttgttttttttc

SEQ ID NO: 2122 - DNA, 20 bp, synthetic construct
  misc_feature 1..20: note = B2M gRNA target site sequence
  source 1..20: mol_type = other DNA
cttttttgttttttttctag

SEQ ID NO: 2123 - DNA, 20 bp, synthetic construct
  misc_feature 1..20: note = B2M gRNA target site sequence
  source 1..20: mol_type = other DNA
ttttttttctagcagatttc

SEQ ID NO: 2124 - DNA, 20 bp, synthetic construct
  misc_feature 1..20: note = B2M gRNA target site sequence
  source 1..20: mol_type = other DNA
tttttctagcagatttctag

SEQ ID NO: 2125 - DNA, 20 bp, synthetic construct
  misc_feature 1..20: note = B2M gRNA target site sequence
  source 1..20: mol_type = other DNA
ctagcagtatcttctgtcac

SEQ ID NO: 2126 - DNA, 20 bp, synthetic construct
  misc_feature 1..20: note = B2M gRNA target site sequence
  source 1..20: mol_type = other DNA
agcagtatcttctgtcactg

SEQ ID NO: 2127 - DNA, 20 bp, synthetic construct
  misc_feature 1..20: note = B2M gRNA target site sequence
  source 1..20: mol_type = other DNA
ggagattgcgctgcattttt

SEQ ID NO: 2128 - DNA, 20 bp, synthetic construct
  misc_feature 1..20: note = B2M gRNA target site sequence
  source 1..20: mol_type = other DNA
agattgcgctgcatttttaa

SEQ ID NO: 2129 - DNA, 20 bp, synthetic construct
  misc_feature 1..20: note = B2M gRNA target site sequence
  source 1..20: mol_type = other DNA
catttttaagagcctttctc

SEQ ID NO: 2130 - DNA, 20 bp, synthetic construct
  misc_feature 1..20: note = B2M gRNA target site sequence
  source 1..20: mol_type = other DNA
tttttaagagcctttctctg

SEQ ID NO: 2131 - DNA, 20 bp, synthetic construct
  misc_feature 1..20: note = B2M gRNA target site sequence
  source 1..20: mol_type = other DNA
ttttaagagcctttctctgg

SEQ ID NO: 2132 - DNA, 20 bp, synthetic construct
  misc_feature 1..20: note = B2M gRNA target site sequence
  source 1..20: mol_type = other DNA
gcctttctctggaggctctc

SEQ ID NO: 2133 - DNA, 20 bp, synthetic construct
  misc_feature 1..20: note = B2M gRNA target site sequence
  source 1..20: mol_type = other DNA
cctttctctggaggctctca

SEQ ID NO: 2134 - DNA, 20 bp, synthetic construct
  misc_feature 1..20: note = B2M gRNA target site sequence
  source 1..20: mol_type = other DNA
aaggacttctgatgccctct

SEQ ID NO: 2135 - DNA, 20 bp, synthetic construct
  misc_feature 1..20: note = B2M gRNA target site sequence
  source 1..20: mol_type = other DNA
tgatgccctctcagcactca

SEQ ID NO: 2136 - DNA, 20 bp, synthetic construct
  misc_feature 1..20: note = B2M gRNA target site sequence
  source 1..20: mol_type = other DNA
cattccttaacacatcactc

SEQ ID NO: 2137 - DNA, 20 bp, synthetic construct
  misc_feature 1..20: note = B2M gRNA target site sequence
  source 1..20: mol_type = other DNA
ttccttaacacatcactcaa

SEQ ID NO: 2138 - DNA, 20 bp, synthetic construct
  misc_feature 1..20: note = B2M gRNA target site sequence
  source 1..20: mol_type = other DNA
actcaagagtctacatgatt

SEQ ID NO: 2139 - DNA, 20 bp, synthetic construct
  misc_feature 1..20: note = B2M gRNA target site sequence
  source 1..20: mol_type = other DNA
agtctacatgatttggcccc

SEQ ID NO: 2140 - DNA, 20 bp, synthetic construct
  misc_feature 1..20: note = B2M gRNA target site sequence
  source 1..20: mol_type = other DNA
tggccccaagatacttttca

SEQ ID NO: 2141 - DNA, 20 bp, synthetic construct
  misc_feature 1..20: note = B2M gRNA target site sequence
  source 1..20: mol_type = other DNA
acttttcaaagttcatttct

SEQ ID NO: 2142 - DNA, 20 bp, synthetic construct
  misc_feature 1..20: note = B2M gRNA target site sequence
  source 1..20: mol_type = other DNA
gttcatttctcagttcataa

SEQ ID NO: 2143 - DNA, 20 bp, synthetic construct
  misc_feature 1..20: note = B2M gRNA target site sequence
  source 1..20: mol_type = other DNA
tatgtttatgcctttctttt

SEQ ID NO: 2144 - DNA, 20 bp, synthetic construct
  misc_feature 1..20: note = B2M gRNA target site sequence
  source 1..20: mol_type = other DNA
ctgattttctaaactgtatg

SEQ ID NO: 2145 - DNA, 20 bp, synthetic construct
  misc_feature 1..20: note = B2M gRNA target site sequence
  source 1..20: mol_type = other DNA
tctaaactgtatgaagtgtc

SEQ ID NO: 2146 - DNA, 20 bp, synthetic construct
  misc_feature 1..20: note = B2M gRNA target site sequence
  source 1..20: mol_type = other DNA
aaactgtatgaagtgtctag

SEQ ID NO: 2147 - DNA, 20 bp, synthetic construct
  misc_feature 1..20: note = B2M gRNA target site sequence
  source 1..20: mol_type = other DNA
actgtatgaagtgtctagta

SEQ ID NO: 2148 - DNA, 20 bp, synthetic construct
  misc_feature 1..20: note = B2M gRNA target site sequence
  source 1..20: mol_type = other DNA
gaagtgtctagtagagtgcc

SEQ ID NO: 2149 - DNA, 20 bp, synthetic construct
  misc_feature 1..20: note = B2M gRNA target site sequence
  source 1..20: mol_type = other DNA
aagtgtctagtagagtgcct

SEQ ID NO: 2150 - DNA, 20 bp, synthetic construct
  misc_feature 1..20: note = B2M gRNA target site sequence
  source 1..20: mol_type = other DNA
ctagtagagtgcctgggaca

SEQ ID NO: 2151 - DNA, 20 bp, synthetic construct
  misc_feature 1..20: note = B2M gRNA target site sequence
  source 1..20: mol_type = other DNA
catagcaattgctctatacg

SEQ ID NO: 2152 - DNA, 20 bp, synthetic construct
  misc_feature 1..20: note = B2M gRNA target site sequence
  source 1..20: mol_type = other DNA
agcaattgctctatacgtgg

SEQ ID NO: 2153 - DNA, 20 bp, synthetic construct
  misc_feature 1..20: note = B2M gRNA target site sequence
  source 1..20: mol_type = other DNA
cgtggcagatgttattatct

SEQ ID NO: 2154 - DNA, 20 bp, synthetic construct
  misc_feature 1..20: note = B2M gRNA target site sequence
  source 1..20: mol_type = other DNA
gtggcagatgttattatctg

SEQ ID NO: 2155 - DNA, 20 bp, synthetic construct
  misc_feature 1..20: note = B2M gRNA target site sequence
  source 1..20: mol_type = other DNA
tgttattatctgaggttcct

SEQ ID NO: 2156 - DNA, 20 bp, synthetic construct
  misc_feature 1..20: note = B2M gRNA target site sequence
  source 1..20: mol_type = other DNA
tattatctgaggttcctaag

SEQ ID NO: 2157 - DNA, 20 bp, synthetic construct
  misc_feature 1..20: note = B2M gRNA target site sequence
  source 1..20: mol_type = other DNA
gttcctaagtggatcaaccc

SEQ ID NO: 2158 - DNA, 20 bp, synthetic construct
  misc_feature 1..20: note = B2M gRNA target site sequence
  source 1..20: mol_type = other DNA
ttcctaagtggatcaaccca

SEQ ID NO: 2159 - DNA, 20 bp, synthetic construct
  misc_feature 1..20: note = B2M gRNA target site sequence
  source 1..20: mol_type = other DNA
ttttttatttttttattttt

SEQ ID NO: 2160 - DNA, 20 bp, synthetic construct
  misc_feature 1..20: note = B2M gRNA target site sequence
  source 1..20: mol_type = other DNA
tttttatttttttatttttt

SEQ ID NO: 2161 - DNA, 20 bp, synthetic construct
  misc_feature 1..20: note = B2M gRNA target site sequence
  source 1..20: mol_type = other DNA
tatttttttattttttggga

SEQ ID NO: 2162 - DNA, 20 bp, synthetic construct
  misc_feature 1..20: note = B2M gRNA target site sequence
  source 1..20: mol_type = other DNA
tggaatctcattccattgcc

SEQ ID NO: 2163 - DNA, 20 bp, synthetic construct
  misc_feature 1..20: note = B2M gRNA target site sequence
  source 1..20: mol_type = other DNA
ggaatctcattccattgccc

SEQ ID NO: 2164 - DNA, 20 bp, synthetic construct
  misc_feature 1..20: note = B2M gRNA target site sequence
  source 1..20: mol_type = other DNA
tctcattccattgcccaggc

SEQ ID NO: 2165 - DNA, 20 bp, synthetic construct
  misc_feature 1..20: note = B2M gRNA target site sequence
  source 1..20: mol_type = other DNA
tcattccattgcccaggctg

SEQ ID NO: 2166 - DNA, 20 bp, synthetic construct
  misc_feature 1..20: note = B2M gRNA target site sequence
  source 1..20: mol_type = other DNA
ccattgcccaggctggagtg

SEQ ID NO: 2167 - DNA, 20 bp, synthetic construct
  misc_feature 1..20: note = B2M gRNA target site sequence
  source 1..20: mol_type = other DNA
ccaggctggagtgcagtgtg

SEQ ID NO: 2168 - DNA, 20 bp, synthetic construct
  misc_feature 1..20: note = B2M gRNA target site sequence
  source 1..20: mol_type = other DNA
ggctggagtgcagtgtgcag

SEQ ID NO: 2169 - DNA, 20 bp, synthetic construct
  misc_feature 1..20: note = B2M gRNA target site sequence
  source 1..20: mol_type = other DNA
ggagtgcagtgtgcagtggt

SEQ ID NO: 2170 - DNA, 20 bp, synthetic construct
  misc_feature 1..20: note = B2M gRNA target site sequence
  source 1..20: mol_type = other DNA
agtgtgcagtggtgagatct

SEQ ID NO: 2171 - DNA, 20 bp, synthetic construct
  misc_feature 1..20: note = B2M gRNA target site sequence
  source 1..20: mol_type = other DNA
tcactgcaacctccgcctcc

SEQ ID NO: 2172 - DNA, 20 bp, synthetic construct
  misc_feature 1..20: note = B2M gRNA target site sequence
  source 1..20: mol_type = other DNA
cactgcaacctccgcctcct

SEQ ID NO: 2173 - DNA, 20 bp, synthetic construct
  misc_feature 1..20: note = B2M gRNA target site sequence
  source 1..20: mol_type = other DNA
aacctccgcctcctgggttc

SEQ ID NO: 2174 - DNA, 20 bp, synthetic construct
  misc_feature 1..20: note = B2M gRNA target site sequence
  source 1..20: mol_type = other DNA
tcctgggttcaagtgattcc

SEQ ID NO: 2175 - DNA, 20 bp, synthetic construct
  misc_feature 1..20: note = B2M gRNA target site sequence
  source 1..20: mol_type = other DNA
cctgggttcaagtgattcct

SEQ ID NO: 2176 - DNA, 20 bp, synthetic construct
  misc_feature 1..20: note = B2M gRNA target site sequence
  source 1..20: mol_type = other DNA
tcaagtgattcctgggacta

SEQ ID NO: 2177 - DNA, 20 bp, synthetic construct
  misc_feature 1..20: note = B2M gRNA target site sequence
  source 1..20: mol_type = other DNA
caagtgattcctgggactac

SEQ ID NO: 2178 - DNA, 20 bp, synthetic construct
  misc_feature 1..20: note = B2M gRNA target site sequence
  source 1..20: mol_type = other DNA
caggcacacaccaccatgcc

SEQ ID NO: 2179 - DNA, 20 bp, synthetic construct
  misc_feature 1..20: note = B2M gRNA target site sequence
  source 1..20: mol_type = other DNA
ctggttaatttttgtatttt

SEQ ID NO: 2180 - DNA, 20 bp, synthetic construct
  misc_feature 1..20: note = B2M gRNA target site sequence
  source 1..20: mol_type = other DNA
gttaatttttgtattttcag

SEQ ID NO: 2181 - DNA, 20 bp, synthetic construct
  misc_feature 1..20: note = B2M gRNA target site sequence
  source 1..20: mol_type = other DNA
taatttttgtattttcagta

SEQ ID NO: 2182 - DNA, 20 bp, synthetic construct
  misc_feature 1..20: note = B2M gRNA target site sequence
  source 1..20: mol_type = other DNA
ttttgtattttcagtagaga

SEQ ID NO: 2183 - DNA, 20 bp, synthetic construct
  misc_feature 1..20: note = B2M gRNA target site sequence
  source 1..20: mol_type = other DNA
tttgtattttcagtagagac

SEQ ID NO: 2184 - DNA, 20 bp, synthetic construct
  misc_feature 1..20: note = B2M gRNA target site sequence
  source 1..20: mol_type = other DNA
gagacgggatttcaccatgt

SEQ ID NO: 2185 - DNA, 20 bp, synthetic construct
  misc_feature 1..20: note = B2M gRNA target site sequence
  source 1..20: mol_type = other DNA
cgggatttcaccatgttggc

SEQ ID NO: 2186 - DNA, 20 bp, synthetic construct
  misc_feature 1..20: note = B2M gRNA target site sequence
  source 1..20: mol_type = other DNA
gggatttcaccatgttggcc

SEQ ID NO: 2187 - DNA, 20 bp, synthetic construct
  misc_feature 1..20: note = B2M gRNA target site sequence
  source 1..20: mol_type = other DNA
tttcaccatgttggccaggc

SEQ ID NO: 2188 - DNA, 20 bp, synthetic construct
  misc_feature 1..20: note = B2M gRNA target site sequence
  source 1..20: mol_type = other DNA
ggtcttgaactcccaacttc

SEQ ID NO: 2189 - DNA, 20 bp, synthetic construct
  misc_feature 1..20: note = B2M gRNA target site sequence
  source 1..20: mol_type = other DNA
aactcccaacttcaagtgat

SEQ ID NO: 2190 - DNA, 20 bp, synthetic construct
  misc_feature 1..20: note = B2M gRNA target site sequence
  source 1..20: mol_type = other DNA
ttcaagtgatcagcctgcct

SEQ ID NO: 2191 - DNA, 20 bp, synthetic construct
  misc_feature 1..20: note = B2M gRNA target site sequence
  source 1..20: mol_type = other DNA
cagcctgccttggcctccca

SEQ ID NO: 2192 - DNA, 20 bp, synthetic construct
  misc_feature 1..20: note = B2M gRNA target site sequence
  source 1..20: mol_type = other DNA
gccttggcctcccaaagtgt

SEQ ID NO: 2193 - DNA, 20 bp, synthetic construct
  misc_feature 1..20: note = B2M gRNA target site sequence
  source 1..20: mol_type = other DNA
ccttggcctcccaaagtgtt

SEQ ID NO: 2194 - DNA, 20 bp, synthetic construct
  misc_feature 1..20: note = B2M gRNA target site sequence
  source 1..20: mol_type = other DNA
ctcccaaagtgttgggatta

SEQ ID NO: 2195 - DNA, 20 bp, synthetic construct
  misc_feature 1..20: note = B2M gRNA target site sequence
  source 1..20: mol_type = other DNA
tcccaaagtgttgggattac

SEQ ID NO: 2196 - DNA, 20 bp, synthetic construct
  misc_feature 1..20: note = B2M gRNA target site sequence
  source 1..20: mol_type = other DNA
agtgttgggattacaggcac

SEQ ID NO: 2197 - DNA, 20 bp, synthetic construct
  misc_feature 1..20: note = B2M gRNA target site sequence
  source 1..20: mol_type = other DNA
ccaccgtgcccaaccaaccc

SEQ ID NO: 2198 - DNA, 20 bp, synthetic construct
  misc_feature 1..20: note = B2M gRNA target site sequence
  source 1..20: mol_type = other DNA
caccgtgcccaaccaaccca

SEQ ID NO: 2199 - DNA, 20 bp, synthetic construct
  misc_feature 1..20: note = B2M gRNA target site sequence
  source 1..20: mol_type = other DNA
aaaacctctttatttctgct

SEQ ID NO: 2200 - DNA, 20 bp, synthetic construct
  misc_feature 1..20: note = B2M gRNA target site sequence
  source 1..20: mol_type = other DNA
aaacctctttatttctgctg

SEQ ID NO: 2201 - DNA, 20 bp, synthetic construct
  misc_feature 1..20: note = B2M gRNA target site sequence
  source 1..20: mol_type = other DNA
tctgctgaggttttatatgc

SEQ ID NO: 2202 - DNA, 20 bp, synthetic construct
  misc_feature 1..20: note = B2M gRNA target site sequence
  source 1..20: mol_type = other DNA
gactttgtacctaatttcat

SEQ ID NO: 2203 - DNA, 20 bp, synthetic construct
  misc_feature 1..20: note = B2M gRNA target site sequence
  source 1..20: mol_type = other DNA
atttcatgagctaaaaaaca

SEQ ID NO: 2204 - DNA, 20 bp, synthetic construct
  misc_feature 1..20: note = B2M gRNA target site sequence
  source 1..20: mol_type = other DNA
aacaaaacctaaatgcatac

SEQ ID NO: 2205 - DNA, 20 bp, synthetic construct
  misc_feature 1..20: note = B2M gRNA target site sequence
  source 1..20: mol_type = other DNA
caaaacctaaatgcatacaa

SEQ ID NO: 2206 - DNA, 20 bp, synthetic construct
  misc_feature 1..20: note = B2M gRNA target site sequence
  source 1..20: mol_type = other DNA
acctaaatgcatacaagagc

SEQ ID NO: 2207 - DNA, 20 bp, synthetic construct
  misc_feature 1..20: note = B2M gRNA target site sequence
  source 1..20: mol_type = other DNA
gagctggcaaataccttaaa

SEQ ID NO: 2208 - DNA, 20 bp, synthetic construct
  misc_feature 1..20: note = B2M gRNA target site sequence
  source 1..20: mol_type = other DNA
ggcaaataccttaaatggtt

SEQ ID NO: 2209 - DNA, 20 bp, synthetic construct
  misc_feature 1..20: note = B2M gRNA target site sequence
  source 1..20: mol_type = other DNA
aataccttaaatggttgagt

SEQ ID NO: 2210 - DNA, 20 bp, synthetic construct
  misc_feature 1..20: note = B2M gRNA target site sequence
  source 1..20: mol_type = other DNA
ttggacccgataaaatacaa

SEQ ID NO: 2211 - DNA, 20 bp, synthetic construct
  misc_feature 1..20: note = B2M gRNA target site sequence
  source 1..20: mol_type = other DNA
tggacccgataaaatacaac

SEQ ID NO: 2212 - DNA, 20 bp, synthetic construct
  misc_feature 1..20: note = B2M gRNA target site sequence
  source 1..20: mol_type = other DNA
ggacccgataaaatacaaca

SEQ ID NO: 2213 - DNA, 20 bp, synthetic construct
  misc_feature 1..20: note = B2M gRNA target site sequence
  source 1..20: mol_type = other DNA
ccgataaaatacaacaggga

SEQ ID NO: 2214 - DNA, 20 bp, synthetic construct
  misc_feature 1..20: note = B2M gRNA target site sequence
  source 1..20: mol_type = other DNA
cgataaaatacaacagggat

SEQ ID NO: 2215 - DNA, 20 bp, synthetic construct
  misc_feature 1..20: note = B2M gRNA target site sequence
  source 1..20: mol_type = other DNA
aaaatacaacagggataggt

SEQ ID NO: 2216 - DNA, 20 bp, synthetic construct
  misc_feature 1..20: note = B2M gRNA target site sequence
  source 1..20: mol_type = other DNA
aaatacaacagggataggtg

SEQ ID NO: 2217 - DNA, 20 bp, synthetic construct
  misc_feature 1..20: note = B2M gRNA target site sequence
  source 1..20: mol_type = other DNA
acagggataggtgaggacta

SEQ ID NO: 2218 - DNA, 20 bp, synthetic construct
  misc_feature 1..20: note = B2M gRNA target site sequence
  source 1..20: mol_type = other DNA
taggtgaggactatggcaaa

SEQ ID NO: 2219 - DNA, 20 bp, synthetic construct
  misc_feature 1..20: note = B2M gRNA target site sequence
  source 1..20: mol_type = other DNA
aggtgaggactatggcaaat

SEQ ID NO: 2220 - DNA, 20 bp, synthetic construct
  misc_feature 1..20: note = B2M gRNA target site sequence
  source 1..20: mol_type = other DNA
gaggactatggcaaatggga

SEQ ID NO: 2221 - DNA, 20 bp, synthetic construct
  misc_feature 1..20: note = B2M gRNA target site sequence
  source 1..20: mol_type = other DNA
tactttccattatgatcaaa

SEQ ID NO: 2222 - DNA, 20 bp, synthetic construct
  misc_feature 1..20: note = B2M gRNA target site sequence
  source 1..20: mol_type = other DNA
ctttccattatgatcaaatg

SEQ ID NO: 2223 - DNA, 20 bp, synthetic construct
  misc_feature 1..20: note = B2M gRNA target site sequence
  source 1..20: mol_type = other DNA
aaatggagtaatgcatgtga

SEQ ID NO: 2224 - DNA, 20 bp, synthetic construct
  misc_feature 1..20: note = B2M gRNA target site sequence
  source 1..20: mol_type = other DNA
tggagtaatgcatgtgacag

SEQ ID NO: 2225 - DNA, 20 bp, synthetic construct
  misc_feature 1..20: note = B2M gRNA target site sequence
  source 1..20: mol_type = other DNA
ggagtaatgcatgtgacagt

SEQ ID NO: 2226 - DNA, 20 bp, synthetic construct
  misc_feature 1..20: note = B2M gRNA target site sequence
  source 1..20: mol_type = other DNA
agtgggatttgcgttttaat

SEQ ID NO: 2227 - DNA, 20 bp, synthetic construct
  misc_feature 1..20: note = B2M gRNA target site sequence
  source 1..20: mol_type = other DNA
tgcgttttaattagcatcca

SEQ ID NO: 2228 - DNA, 20 bp, synthetic construct
  misc_feature 1..20: note = B2M gRNA target site sequence
  source 1..20: mol_type = other DNA
gcgttttaattagcatccac

SEQ ID NO: 2229 - DNA, 20 bp, synthetic construct
  misc_feature 1..20: note = B2M gRNA target site sequence
  source 1..20: mol_type = other DNA
cacaggtgattgctgtaaac

SEQ ID NO: 2230 - DNA, 20 bp, synthetic construct
  misc_feature 1..20: note = B2M gRNA target site sequence
  source 1..20: mol_type = other DNA
ggtgattgctgtaaactagc

SEQ ID NO: 2231 - DNA, 20 bp, synthetic construct
  misc_feature 1..20: note = B2M gRNA target site sequence
  source 1..20: mol_type = other DNA
gtgattgctgtaaactagcc

SEQ ID NO: 2232 - DNA, 20 bp, synthetic construct
  misc_feature 1..20: note = B2M gRNA target site sequence
  source 1..20: mol_type = other DNA
ttgctgtaaactagccaggt

SEQ ID NO: 2233 - DNA, 20 bp, synthetic construct
  misc_feature 1..20: note = B2M gRNA target site sequence
  source 1..20: mol_type = other DNA
tgctgtaaactagccaggtt

SEQ ID NO: 2234 - DNA, 20 bp, synthetic construct
  misc_feature 1..20: note = B2M gRNA target site sequence
  source 1..20: mol_type = other DNA
gaatatattgcctaatgttt

SEQ ID NO: 2235 - DNA, 20 bp, synthetic construct
  misc_feature 1..20: note = B2M gRNA target site sequence
  source 1..20: mol_type = other DNA
attgcctaatgtttcagaaa

SEQ ID NO: 2236 - DNA, 20 bp, synthetic construct
  misc_feature 1..20: note = B2M gRNA target site sequence
  source 1..20: mol_type = other DNA
gaaacagtactttccaaaat

SEQ ID NO: 2237 - DNA, 20 bp, synthetic construct
  misc_feature 1..20: note = B2M gRNA target site sequence
  source 1..20: mol_type = other DNA
aacagtactttccaaaatga

SEQ ID NO: 2238 - DNA, 20 bp, synthetic construct
  misc_feature 1..20: note = B2M gRNA target site sequence
  source 1..20: mol_type = other DNA
acagtactttccaaaatgag

SEQ ID NO: 2239 - DNA, 20 bp, synthetic construct
  misc_feature 1..20: note = B2M gRNA target site sequence
  source 1..20: mol_type = other DNA
tccaaaatgagaggcatgac

SEQ ID NO: 2240 - DNA, 20 bp, synthetic construct
  misc_feature 1..20: note = B2M gRNA target site sequence
  source 1..20: mol_type = other DNA
aggcatgactagaccatcca

SEQ ID NO: 2241 - DNA, 20 bp, synthetic construct
  misc_feature 1..20: note = B2M gRNA target site sequence
  source 1..20: mol_type = other DNA
ggcatgactagaccatccat

SEQ ID NO: 2242 - DNA, 20 bp, synthetic construct
  misc_feature 1..20: note = B2M gRNA target site sequence
  source 1..20: mol_type = other DNA
gcatgactagaccatccatg

SEQ ID NO: 2243 - DNA, 20 bp, synthetic construct
  misc_feature 1..20: note = B2M gRNA target site sequence
  source 1..20: mol_type = other DNA
tgactagaccatccatgggg

SEQ ID NO: 2244 - DNA, 20 bp, synthetic construct
  misc_feature 1..20: note = B2M gRNA target site sequence
  source 1..20: mol_type = other DNA
ctagaccatccatggggaag

SEQ ID NO: 2245 - DNA, 20 bp, synthetic construct
  misc_feature 1..20: note = B2M gRNA target site sequence
  source 1..20: mol_type = other DNA
tagaccatccatggggaagt

SEQ ID NO: 2246 - DNA, 20 bp, synthetic construct
  misc_feature 1..20: note = B2M gRNA target site sequence
  source 1..20: mol_type = other DNA
accatccatggggaagtggg

SEQ ID NO: 2247 - DNA, 20 bp, synthetic construct
  misc_feature 1..20: note = B2M gRNA target site sequence
  source 1..20: mol_type = other DNA
tatatttttcattgaaaatg

SEQ ID NO: 2248 - DNA, 20 bp, synthetic construct
  misc_feature 1..20: note = B2M gRNA target site sequence
  source 1..20: mol_type = other DNA
tatttttcattgaaaatgaa

SEQ ID NO: 2249 - DNA, 20 bp, synthetic construct
  misc_feature 1..20: note = B2M gRNA target site sequence
  source 1..20: mol_type = other DNA
ttttcattgaaaatgaagag

SEQ ID NO: 2250 - DNA, 20 bp, synthetic construct
  misc_feature 1..20: note = B2M gRNA target site sequence
  source 1..20: mol_type = other DNA
ttgaaaatgaagagaagtgt

SEQ ID NO: 2251 - DNA, 20 bp, synthetic construct
  misc_feature 1..20: note = B2M gRNA target site sequence
  source 1..20: mol_type = other DNA
tgttagtgctactaaatata

SEQ ID NO: 2252 - DNA, 20 bp, synthetic construct
  misc_feature 1..20: note = B2M gRNA target site sequence
  source 1..20: mol_type = other DNA
cttttaaatacacttatatt

SEQ ID NO: 2253 - DNA, 20 bp, synthetic construct
  misc_feature 1..20: note = B2M gRNA target site sequence
  source 1..20: mol_type = other DNA
ttttaaatacacttatattc

SEQ ID NO: 2254 - DNA, 20 bp, synthetic construct
  misc_feature 1..20: note = B2M gRNA target site sequence
  source 1..20: mol_type = other DNA
tttaaatacacttatattca

SEQ ID NO: 2255 - DNA, 20 bp, synthetic construct
  misc_feature 1..20: note = B2M gRNA target site sequence
  source 1..20: mol_type = other DNA
tcagggtacatgatcactaa

SEQ ID NO: 2256 - DNA, 20 bp, synthetic construct
  misc_feature 1..20: note = B2M gRNA target site sequence
  source 1..20: mol_type = other DNA
cagggtacatgatcactaaa

SEQ ID NO: 2257 - DNA, 20 bp, synthetic construct
  misc_feature 1..20: note = B2M gRNA target site sequence
  source 1..20: mol_type = other DNA
ggtacatgatcactaaaagg

SEQ ID NO: 2258 - DNA, 20 bp, synthetic construct
  misc_feature 1..20: note = B2M gRNA target site sequence
  source 1..20: mol_type = other DNA
ggcagctactcctccttgtc

SEQ ID NO: 2259 - DNA, 20 bp, synthetic construct
  misc_feature 1..20: note = B2M gRNA target site sequence
  source 1..20: mol_type = other DNA
gcagctactcctccttgtct

SEQ ID NO: 2260 - DNA, 20 bp, synthetic construct
  misc_feature 1..20: note = B2M gRNA target site sequence
  source 1..20: mol_type = other DNA
agctactcctccttgtctgg

SEQ ID NO: 2261 - DNA, 20 bp, synthetic construct
  misc_feature 1..20: note = B2M gRNA target site sequence
  source 1..20: mol_type = other DNA
gctactcctccttgtctggg

SEQ ID NO: 2262 - DNA, 20 bp, synthetic construct
  misc_feature 1..20: note = B2M gRNA target site sequence
  source 1..20: mol_type = other DNA
cctccttgtctgggaggctg

SEQ ID NO: 2263 - DNA, 20 bp, synthetic construct
  misc_feature 1..20: note = B2M gRNA target site sequence
  source 1..20: mol_type = other DNA
ctccttgtctgggaggctgt

SEQ ID NO: 2264 - DNA, 20 bp, synthetic construct
  misc_feature 1..20: note = B2M gRNA target site sequence
  source 1..20: mol_type = other DNA
tccttgtctgggaggctgtg

SEQ ID NO: 2265 - DNA, 20 bp, synthetic construct
  misc_feature 1..20: note = B2M gRNA target site sequence
  source 1..20: mol_type = other DNA
cttgtctgggaggctgtggg

SEQ ID NO: 2266 - DNA, 20 bp, synthetic construct
  misc_feature 1..20: note = B2M gRNA target site sequence
  source 1..20: mol_type = other DNA
gtctgggaggctgtggggag

SEQ ID NO: 2267 - DNA, 20 bp, synthetic construct
  misc_feature 1..20: note = B2M gRNA target site sequence
  source 1..20: mol_type = other DNA
tctgggaggctgtggggaga

SEQ ID NO: 2268 - DNA, 20 bp, synthetic construct
  misc_feature 1..20: note = B2M gRNA target site sequence
  source 1..20: mol_type = other DNA
tgggaggctgtggggagaag

SEQ ID NO: 2269 - DNA, 20 bp, synthetic construct
  misc_feature 1..20: note = B2M gRNA target site sequence
  source 1..20: mol_type = other DNA
gggaggctgtggggagaagg

SEQ ID NO: 2270 - DNA, 20 bp, synthetic construct
  misc_feature 1..20: note = B2M gRNA target site sequence
  source 1..20: mol_type = other DNA
gaggctgtggggagaaggag

SEQ ID NO: 2271 - DNA, 20 bp, synthetic construct
  misc_feature 1..20: note = B2M gRNA target site sequence
  source 1..20: mol_type = other DNA
gtggggagaaggaggagtac

SEQ ID NO: 2272 - DNA, 20 bp, synthetic construct
  misc_feature 1..20: note = B2M gRNA target site sequence
  source 1..20: mol_type = other DNA
tggggagaaggaggagtacc

SEQ ID NO: 2273 - DNA, 20 bp, synthetic construct
  misc_feature 1..20: note = B2M gRNA target site sequence
  source 1..20: mol_type = other DNA
gagtaccaggccaccttgac

SEQ ID NO: 2274 - DNA, 20 bp, synthetic construct
  misc_feature 1..20: note = B2M gRNA target site sequence
  source 1..20: mol_type = other DNA
cttgaccagatatatctctc

SEQ ID NO: 2275 - DNA, 20 bp, synthetic construct
  misc_feature 1..20: note = B2M gRNA target site sequence
  source 1..20: mol_type = other DNA
tctagaaacaccctatcatt

SEQ ID NO: 2276 - DNA, 20 bp, synthetic construct
  misc_feature 1..20: note = B2M gRNA target site sequence
  source 1..20: mol_type = other DNA
ctagaaacaccctatcatta

SEQ ID NO: 2277 - DNA, 20 bp, synthetic construct
  misc_feature 1..20: note = B2M gRNA target site sequence
  source 1..20: mol_type = other DNA
aaacaccctatcattaagga

SEQ ID NO: 2278 - DNA, 20 bp, synthetic construct
  misc_feature 1..20: note = B2M gRNA target site sequence
  source 1..20: mol_type = other DNA
aacaccctatcattaaggaa

SEQ ID NO: 2279 - DNA, 20 bp, synthetic construct
  misc_feature 1..20: note = B2M gRNA target site sequence
  source 1..20: mol_type = other DNA
tatcattaaggaaaggctac

SEQ ID NO: 2280 - DNA, 20 bp, synthetic construct
  misc_feature 1..20: note = B2M gRNA target site sequence
  source 1..20: mol_type = other DNA
gaaaggctactagccccatc

SEQ ID NO: 2281 - DNA, 20 bp, synthetic construct
  misc_feature 1..20: note = B2M gRNA target site sequence
  source 1..20: mol_type = other DNA
aaggctactagccccatcaa

SEQ ID NO: 2282 - DNA, 20 bp, synthetic construct
  misc_feature 1..20: note = B2M gRNA target site sequence
  source 1..20: mol_type = other DNA
aggctactagccccatcaag

SEQ ID NO: 2283 - DNA, 20 bp, synthetic construct
  misc_feature 1..20: note = B2M gRNA target site sequence
  source 1..20: mol_type = other DNA
ctactagccccatcaagagg

SEQ ID NO: 2284 - DNA, 20 bp, synthetic construct
  misc_feature 1..20: note = B2M gRNA target site sequence
  source 1..20: mol_type = other DNA
agccccatcaagaggtggat

SEQ ID NO: 2285 - DNA, 20 bp, synthetic construct
  misc_feature 1..20: note = B2M gRNA target site sequence
  source 1..20: mol_type = other DNA
gccccatcaagaggtggatt

SEQ ID NO: 2286 - DNA, 20 bp, synthetic construct
  misc_feature 1..20: note = B2M gRNA target site sequence
  source 1..20: mol_type = other DNA
ccccatcaagaggtggattg

SEQ ID NO: 2287 - DNA, 20 bp, synthetic construct
  misc_feature 1..20: note = B2M gRNA target site sequence
  source 1..20: mol_type = other DNA
gtggattggggaatctaatg

SEQ ID NO: 2288 - DNA, 20 bp, synthetic construct
  misc_feature 1..20: note = B2M gRNA target site sequence
  source 1..20: mol_type = other DNA
gatttttttcataacattaa

SEQ ID NO: 2289 - DNA, 20 bp, synthetic construct
  misc_feature 1..20: note = B2M gRNA target site sequence
  source 1..20: mol_type = other DNA
ttttcataacattaaaagct

SEQ ID NO: 2290 - DNA, 20 bp, synthetic construct
  misc_feature 1..20: note = B2M gRNA target site sequence
  source 1..20: mol_type = other DNA
ttcataacattaaaagctaa

SEQ ID NO: 2291 - DNA, 20 bp, synthetic construct
  misc_feature 1..20: note = B2M gRNA target site sequence
  source 1..20: mol_type = other DNA
cataacattaaaagctaaga

SEQ ID NO: 2292 - DNA, 20 bp, synthetic construct
  misc_feature 1..20: note = B2M gRNA target site sequence
  source 1..20: mol_type = other DNA
taagagagctctttgcatct

SEQ ID NO: 2293 - DNA, 20 bp, synthetic construct
  misc_feature 1..20: note = B2M gRNA target site sequence
  source 1..20: mol_type = other DNA
gcatctgagcttctaataat

SEQ ID NO: 2294 - DNA, 20 bp, synthetic construct
  misc_feature 1..20: note = B2M gRNA target site sequence
  source 1..20: mol_type = other DNA
taagaacatattaaatgcct

SEQ ID NO: 2295 - DNA, 20 bp, synthetic construct
  misc_feature 1..20: note = B2M gRNA target site sequence
  source 1..20: mol_type = other DNA
aagaacatattaaatgcctc

SEQ ID NO: 2296 - DNA, 20 bp, synthetic construct
  misc_feature 1..20: note = B2M gRNA target site sequence
  source 1..20: mol_type = other DNA
agaacatattaaatgcctca

SEQ ID NO: 2297 - DNA, 20 bp, synthetic construct
  misc_feature 1..20: note = B2M gRNA target site sequence
  source 1..20: mol_type = other DNA
atattaaatgcctcagggat

SEQ ID NO: 2298 - DNA, 20 bp, synthetic construct
  misc_feature 1..20: note = B2M gRNA target site sequence
  source 1..20: mol_type = other DNA
attaaatgcctcagggatca

SEQ ID NO: 2299 - DNA, 20 bp, synthetic construct
  misc_feature 1..20: note = B2M gRNA target site sequence
  source 1..20: mol_type = other DNA
atgcctcagggatcagagca

SEQ ID NO: 2300 - DNA, 20 bp, synthetic construct
  misc_feature 1..20: note = B2M gRNA target site sequence
  source 1..20: mol_type = other DNA
gagcacagattcatcctgcc

SEQ ID NO: 2301 - DNA, 20 bp, synthetic construct
  misc_feature 1..20: note = B2M gRNA target site sequence
  source 1..20: mol_type = other DNA
ctgcctggaactctctgttt

SEQ ID NO: 2302 - DNA, 20 bp, synthetic construct
  misc_feature 1..20: note = B2M gRNA target site sequence
  source 1..20: mol_type = other DNA
tgcctggaactctctgtttg

SEQ ID NO: 2303 - DNA, 20 bp, synthetic construct
  misc_feature 1..20: note = B2M gRNA target site sequence
  source 1..20: mol_type = other DNA
gcctggaactctctgtttga

SEQ ID NO: 2304 - DNA, 20 bp, synthetic construct
  misc_feature 1..20: note = B2M gRNA target site sequence
  source 1..20: mol_type = other DNA
tggaactctctgtttgaggg

SEQ ID NO: 2305 - DNA, 20 bp, synthetic construct
  misc_feature 1..20: note = B2M gRNA target site sequence
  source 1..20: mol_type = other DNA
ggaactctctgtttgaggga

SEQ ID NO: 2306 - DNA, 20 bp, synthetic construct
  misc_feature 1..20: note = B2M gRNA target site sequence
  source 1..20: mol_type = other DNA
actctctgtttgagggaagg

SEQ ID NO: 2307 - DNA, 20 bp, synthetic construct
  misc_feature 1..20: note = B2M gRNA target site sequence
  source 1..20: mol_type = other DNA
tctgtttgagggaaggcggc

SEQ ID NO: 2308 - DNA, 20 bp, synthetic construct
  misc_feature 1..20: note = B2M gRNA target site sequence
  source 1..20: mol_type = other DNA
ggaaggcggcaagattttgt

SEQ ID NO: 2309 - DNA, 20 bp, synthetic construct
  misc_feature 1..20: note = B2M gRNA target site sequence
  source 1..20: mol_type = other DNA
aaggcggcaagattttgtga

SEQ ID NO: 2310 - DNA, 20 bp, synthetic construct
  misc_feature 1..20: note = B2M gRNA target site sequence
  source 1..20: mol_type = other DNA
gcatcactgtaatcttttct

SEQ ID NO: 2311 - DNA, 20 bp, synthetic construct
  misc_feature 1..20: note = B2M gRNA target site sequence
  source 1..20: mol_type = other DNA
tcactgtaatcttttctaag

SEQ ID NO: 2312 - DNA, 20 bp, synthetic construct
  misc_feature 1..20: note = B2M gRNA target site sequence
  source 1..20: mol_type = other DNA
actgtaatcttttctaagaa

SEQ ID NO: 2313 - DNA, 20 bp, synthetic construct
  misc_feature 1..20: note = B2M gRNA target site sequence
  source 1..20: mol_type = other DNA
ctgtaatcttttctaagaag

SEQ ID NO: 2314 - DNA, 20 bp, synthetic construct
  misc_feature 1..20: note = B2M gRNA target site sequence
  source 1..20: mol_type = other DNA
atcttttctaagaagaggac

SEQ ID NO: 2315 - DNA, 20 bp, synthetic construct
  misc_feature 1..20: note = B2M gRNA target site sequence
  source 1..20: mol_type = other DNA
tctaagaagaggacaagtat

SEQ ID NO: 2316 - DNA, 20 bp, synthetic construct
  misc_feature 1..20: note = B2M gRNA target site sequence
  source 1..20: mol_type = other DNA
agaagaggacaagtatcaga

SEQ ID NO: 2317 - DNA, 20 bp, synthetic construct
  misc_feature 1..20: note = B2M gRNA target site sequence
  source 1..20: mol_type = other DNA
gaagaggacaagtatcagac

SEQ ID NO: 2318 - DNA, 20 bp, synthetic construct
  misc_feature 1..20: note = B2M gRNA target site sequence
  source 1..20: mol_type = other DNA
aggacaagtatcagacaggc

SEQ ID NO: 2319 - DNA, 20 bp, synthetic construct
  misc_feature 1..20: note = B2M gRNA target site sequence
  source 1..20: mol_type = other DNA
ggacaagtatcagacaggct

SEQ ID NO: 2320 - DNA, 20 bp, synthetic construct
  misc_feature 1..20: note = B2M gRNA target site sequence
  source 1..20: mol_type = other DNA
agacaggctgggtttgaatt

SEQ ID NO: 2321 - DNA, 20 bp, synthetic construct
  misc_feature 1..20: note = B2M gRNA target site sequence
  source 1..20: mol_type = other DNA
gacaggctgggtttgaattt

SEQ ID NO: 2322 - DNA, 20 bp, synthetic construct
  misc_feature 1..20: note = B2M gRNA target site sequence
  source 1..20: mol_type = other DNA
ggtttgaatttgggctcaac

SEQ ID NO: 2323 - DNA, 20 bp, synthetic construct
  misc_feature 1..20: note = B2M gRNA target site sequence
  source 1..20: mol_type = other DNA
atttgggctcaaccagttac

SEQ ID NO: 2324 - DNA, 20 bp, synthetic construct
  misc_feature 1..20: note = B2M gRNA target site sequence
  source 1..20: mol_type = other DNA
gttactggctttatgacttt

SEQ ID NO: 2325 - DNA, 20 bp, synthetic construct
  misc_feature 1..20: note = B2M gRNA target site sequence
  source 1..20: mol_type = other DNA
tactggctttatgacttttg

SEQ ID NO: 2326 - DNA, 20 bp, synthetic construct
  misc_feature 1..20: note = B2M gRNA target site sequence
  source 1..20: mol_type = other DNA
ctggctttatgacttttgga

SEQ ID NO: 2327 - DNA, 20 bp, synthetic construct
  misc_feature 1..20: note = B2M gRNA target site sequence
  source 1..20: mol_type = other DNA
tgacttttggagagttattt

SEQ ID NO: 2328 - DNA, 20 bp, synthetic construct
  misc_feature 1..20: note = B2M gRNA target site sequence
  source 1..20: mol_type = other DNA
gaaaaattaatttatgccca

SEQ ID NO: 2329 - DNA, 20 bp, synthetic construct
  misc_feature 1..20: note = B2M gRNA target site sequence
  source 1..20: mol_type = other DNA
acaaaaacaaaacccacaca

SEQ ID NO: 2330 - DNA, 20 bp, synthetic construct
  misc_feature 1..20: note = B2M gRNA target site sequence
  source 1..20: mol_type = other DNA
caaaaacaaaacccacacac

SEQ ID NO: 2331 - DNA, 20 bp, synthetic construct
  misc_feature 1..20: note = B2M gRNA target site sequence
  source 1..20: mol_type = other DNA
aacaaaacccacacacaggt

SEQ ID NO: 2332 - DNA, 20 bp, synthetic construct
  misc_feature 1..20: note = B2M gRNA target site sequence
  source 1..20: mol_type = other DNA
caaaacccacacacaggtca

SEQ ID NO: 2333 - DNA, 20 bp, synthetic construct
  misc_feature 1..20: note = B2M gRNA target site sequence
  source 1..20: mol_type = other DNA
aaaacccacacacaggtcag

SEQ ID NO: 2334 - DNA, 20 bp, synthetic construct
  misc_feature 1..20: note = B2M gRNA target site sequence
  source 1..20: mol_type = other DNA
aacccacacacaggtcagag

SEQ ID NO: 2335 - DNA, 20 bp, synthetic construct
  misc_feature 1..20: note = B2M gRNA target site sequence
  source 1..20: mol_type = other DNA
acccacacacaggtcagagg

SEQ ID NO: 2336 - DNA, 20 bp, synthetic construct
  misc_feature 1..20: note = B2M gRNA target site sequence
  source 1..20: mol_type = other DNA
cacaggtcagaggaggaaaa

SEQ ID NO: 2337 - DNA, 20 bp, synthetic construct
  misc_feature 1..20: note = B2M gRNA target site sequence
  source 1..20: mol_type = other DNA
agaggaggaaaatagacctt

SEQ ID NO: 2338 - DNA, 20 bp, synthetic construct
  misc_feature 1..20: note = B2M gRNA target site sequence
  source 1..20: mol_type = other DNA
aggaggaaaatagaccttca

SEQ ID NO: 2339 - DNA, 20 bp, synthetic construct
  misc_feature 1..20: note = B2M gRNA target site sequence
  source 1..20: mol_type = other DNA
ggaggaaaatagaccttcag

SEQ ID NO: 2340 - DNA, 20 bp, synthetic construct
  misc_feature 1..20: note = B2M gRNA target site sequence
  source 1..20: mol_type = other DNA
tcatcattacatgtttcttg

SEQ ID NO: 2341 - DNA, 20 bp, synthetic construct
  misc_feature 1..20: note = B2M gRNA target site sequence
  source 1..20: mol_type = other DNA
atgtttcttgtggtatcttc

SEQ ID NO: 2342 - DNA, 20 bp, synthetic construct
  misc_feature 1..20: note = B2M gRNA target site sequence
  source 1..20: mol_type = other DNA
cttgtggtatcttccagaaa

SEQ ID NO: 2343 - DNA, 20 bp, synthetic construct
  misc_feature 1..20: note = B2M gRNA target site sequence
  source 1..20: mol_type = other DNA
ttccagaaatggtctatgca

SEQ ID NO: 2344 - DNA, 20 bp, synthetic construct
  misc_feature 1..20: note = B2M gRNA target site sequence
  source 1..20: mol_type = other DNA
atgcatggcatgtattactt

SEQ ID NO: 2345 - DNA, 20 bp, synthetic construct
  misc_feature 1..20: note = B2M gRNA target site sequence
  source 1..20: mol_type = other DNA
actttggaaattttcaaaat

SEQ ID NO: 2346 - DNA, 20 bp, synthetic construct
  misc_feature 1..20: note = B2M gRNA target site sequence
  source 1..20: mol_type = other DNA
taagatttttttttaaatat

SEQ ID NO: 2347 - DNA, 20 bp, synthetic construct
  misc_feature 1..20: note = B2M gRNA target site sequence
  source 1..20: mol_type = other DNA
aaaatgacatctaacataac

SEQ ID NO: 2348 - DNA, 20 bp, synthetic construct
  misc_feature 1..20: note = B2M gRNA target site sequence
  source 1..20: mol_type = other DNA
ctaacataaccagcaaatac

SEQ ID NO: 2349 - DNA, 20 bp, synthetic construct
  misc_feature 1..20: note = B2M gRNA target site sequence
  source 1..20: mol_type = other DNA
taaccagcaaataccagtaa

SEQ ID NO: 2350 - DNA, 20 bp, synthetic construct
  misc_feature 1..20: note = B2M gRNA target site sequence
  source 1..20: mol_type = other DNA
ccagcaaataccagtaatgg

SEQ ID NO: 2351 - DNA, 20 bp, synthetic construct
  misc_feature 1..20: note = B2M gRNA target site sequence
  source 1..20: mol_type = other DNA
tgctttcgatcatgttttgc

SEQ ID NO: 2352 - DNA, 20 bp, synthetic construct
  misc_feature 1..20: note = B2M gRNA target site sequence
  source 1..20: mol_type = other DNA
ctttcgatcatgttttgcca

SEQ ID NO: 2353 - DNA, 20 bp, synthetic construct
  misc_feature 1..20: note = B2M gRNA target site sequence
  source 1..20: mol_type = other DNA
tttcgatcatgttttgccag

SEQ ID NO: 2354 - DNA, 20 bp, synthetic construct
  misc_feature 1..20: note = B2M gRNA target site sequence
  source 1..20: mol_type = other DNA
atcatgttttgccagaggaa

SEQ ID NO: 2355 - DNA, 20 bp, synthetic construct
  misc_feature 1..20: note = B2M gRNA target site sequence
  source 1..20: mol_type = other DNA
tcatgttttgccagaggaaa

SEQ ID NO: 2356 - DNA, 20 bp, synthetic construct
  misc_feature 1..20: note = B2M gRNA target site sequence
  source 1..20: mol_type = other DNA
gttttgccagaggaaaaggt

SEQ ID NO: 2357 - DNA, 20 bp, synthetic construct
  misc_feature 1..20: note = B2M gRNA target site sequence
  source 1..20: mol_type = other DNA
gaggaaaaggtgagcgcgct

SEQ ID NO: 2358 - DNA, 20 bp, synthetic construct
  misc_feature 1..20: note = B2M gRNA target site sequence
  source 1..20: mol_type = other DNA
gagcgcgcttagtgtattgc

SEQ ID NO: 2359 - DNA, 20 bp, synthetic construct
  misc_feature 1..20: note = B2M gRNA target site sequence
  source 1..20: mol_type = other DNA
agcgcgcttagtgtattgcc

SEQ ID NO: 2360 - DNA, 20 bp, synthetic construct
  misc_feature 1..20: note = B2M gRNA target site sequence
  source 1..20: mol_type = other DNA
ttagtgtattgccaggtact

SEQ ID NO: 2361 - DNA, 20 bp, synthetic construct
  misc_feature 1..20: note = B2M gRNA target site sequence
  source 1..20: mol_type = other DNA
tgtattgccaggtacttaga

SEQ ID NO: 2362 - DNA, 20 bp, synthetic construct
  misc_feature 1..20: note = B2M gRNA target site sequence
  source 1..20: mol_type = other DNA
caggtacttagaaagtgctc

SEQ ID NO: 2363 - DNA, 20 bp, synthetic construct
  misc_feature 1..20: note = B2M gRNA target site sequence
  source 1..20: mol_type = other DNA
tagaaagtgctcaagatctc

SEQ ID NO: 2364 - DNA, 20 bp, synthetic construct
  misc_feature 1..20: note = B2M gRNA target site sequence
  source 1..20: mol_type = other DNA
aagatctctggcgtcctcaa

SEQ ID NO: 2365 - DNA, 20 bp, synthetic construct
  misc_feature 1..20: note = B2M gRNA target site sequence
  source 1..20: mol_type = other DNA
tctggcgtcctcaacagtct

SEQ ID NO: 2366 - DNA, 20 bp, synthetic construct
  misc_feature 1..20: note = B2M gRNA target site sequence
  source 1..20: mol_type = other DNA
aacagtcttggtaaccatct

SEQ ID NO: 2367 - DNA, 20 bp, synthetic construct
  misc_feature 1..20: note = B2M gRNA target site sequence
  source 1..20: mol_type = other DNA
tcttggattatctttattaa

SEQ ID NO: 2368 - DNA, 20 bp, synthetic construct
  misc_feature 1..20: note = B2M gRNA target site sequence
  source 1..20: mol_type = other DNA
tatctttattaatggtttta

SEQ ID NO: 2369 - DNA, 20 bp, synthetic construct
  misc_feature 1..20: note = B2M gRNA target site sequence
  source 1..20: mol_type = other DNA
tttttttttttttctttttt

SEQ ID NO: 2370 - DNA, 20 bp, synthetic construct
  misc_feature 1..20: note = B2M gRNA target site sequence
  source 1..20: mol_type = other DNA
tttttttttttcttttttga

SEQ ID NO: 2371 - DNA, 20 bp, synthetic construct
  misc_feature 1..20: note = B2M gRNA target site sequence
  source 1..20: mol_type = other DNA
tttttttcttttttgagaga

SEQ ID NO: 2372 - DNA, 20 bp, synthetic construct
  misc_feature 1..20: note = B2M gRNA target site sequence
  source 1..20: mol_type = other DNA
ttttttcttttttgagagac

SEQ ID NO: 2373 - DNA, 20 bp, synthetic construct
  misc_feature 1..20: note = B2M gRNA target site sequence
  source 1..20: mol_type = other DNA
tttttcttttttgagagaca

SEQ ID NO: 2374 - DNA, 20 bp, synthetic construct
  misc_feature 1..20: note = B2M gRNA target site sequence
  source 1..20: mol_type = other DNA
tctcgctctgttgcccacgc

SEQ ID NO: 2375 - DNA, 20 bp, synthetic construct
  misc_feature 1..20: note = B2M gRNA target site sequence
  source 1..20: mol_type = other DNA
tcgctctgttgcccacgctg

SEQ ID NO: 2376 - DNA, 20 bp, synthetic construct
  misc_feature 1..20: note = B2M gRNA target site sequence
  source 1..20: mol_type = other DNA
ttgcccacgctggagtgcac

SEQ ID NO: 2377 - DNA, 20 bp, synthetic construct
  misc_feature 1..20: note = B2M gRNA target site sequence
  source 1..20: mol_type = other DNA
ggagtgcactggcgccatga

SEQ ID NO: 2378 - DNA, 20 bp, synthetic construct
  misc_feature 1..20: note = B2M gRNA target site sequence
  source 1..20: mol_type = other DNA
ctggcgccatgatagctcaa

SEQ ID NO: 2379 - DNA, 20 bp, synthetic construct
  misc_feature 1..20: note = B2M gRNA target site sequence
  source 1..20: mol_type = other DNA
ccatgatagctcaaaagcct

SEQ ID NO: 2380 - DNA, 20 bp, synthetic construct
  misc_feature 1..20: note = B2M gRNA target site sequence
  source 1..20: mol_type = other DNA
tagctcaaaagcctaagctc

SEQ ID NO: 2381 - DNA, 20 bp, synthetic construct
  misc_feature 1..20: note = B2M gRNA target site sequence
  source 1..20: mol_type = other DNA
gctcaaaagcctaagctcaa

SEQ ID NO: 2382 - DNA, 20 bp, synthetic construct
  misc_feature 1..20: note = B2M gRNA target site sequence
  source 1..20: mol_type = other DNA
ctcaagagatcctcccgcct

SEQ ID NO: 2383 - DNA, 20 bp, synthetic construct
  misc_feature 1..20: note = B2M gRNA target site sequence
  source 1..20: mol_type = other DNA
gatcctcccgcctcagccac

SEQ ID NO: 2384 - DNA, 20 bp, synthetic construct
  misc_feature 1..20: note = B2M gRNA target site sequence
  source 1..20: mol_type = other DNA
tcctcccgcctcagccaccg

SEQ ID NO: 2385 - DNA, 20 bp, synthetic construct
  misc_feature 1..20: note = B2M gRNA target site sequence
  source 1..20: mol_type = other DNA
tcccgcctcagccaccggag

SEQ ID NO: 2386 - DNA, 20 bp, synthetic construct
  misc_feature 1..20: note = B2M gRNA target site sequence
  source 1..20: mol_type = other DNA
gcctcagccaccggagcagc

SEQ ID NO: 2387 - DNA, 20 bp, synthetic construct
  misc_feature 1..20: note = B2M gRNA target site sequence
  source 1..20: mol_type = other DNA
cctcagccaccggagcagct

SEQ ID NO: 2388 - DNA, 20 bp, synthetic construct
  misc_feature 1..20: note = B2M gRNA target site sequence
  source 1..20: mol_type = other DNA
caccggagcagctgggacca

SEQ ID NO: 2389 - DNA, 20 bp, synthetic construct
  misc_feature 1..20: note = B2M gRNA target site sequence
  source 1..20: mol_type = other DNA
accggagcagctgggaccac

SEQ ID NO: 2390 - DNA, 20 bp, synthetic construct
  misc_feature 1..20: note = B2M gRNA target site sequence
  source 1..20: mol_type = other DNA
gcagctgggaccacaggcac

SEQ ID NO: 2391 - DNA, 20 bp, synthetic construct
  misc_feature 1..20: note = B2M gRNA target site sequence
  source 1..20: mol_type = other DNA
caggcacgagccaccacacc

SEQ ID NO: 2392 - DNA, 20 bp, synthetic construct
  misc_feature 1..20: note = B2M gRNA target site sequence
  source 1..20: mol_type = other DNA
atttttgttattattttttg

SEQ ID NO: 2393 - DNA, 20 bp, synthetic construct
  misc_feature 1..20: note = B2M gRNA target site sequence
  source 1..20: mol_type = other DNA
ttttgttattattttttgta

SEQ ID NO: 2394 - DNA, 20 bp, synthetic construct
  misc_feature 1..20: note = B2M gRNA target site sequence
  source 1..20: mol_type = other DNA
ttattattttttgtagagac

SEQ ID NO: 2395 - DNA, 20 bp, synthetic construct
  misc_feature 1..20: note = B2M gRNA target site sequence
  source 1..20: mol_type = other DNA
tattattttttgtagagacc

SEQ ID NO: 2396 - DNA, 20 bp, synthetic construct
  misc_feature 1..20: note = B2M gRNA target site sequence
  source 1..20: mol_type = other DNA
gagaccaggcttcaccatgt

SEQ ID NO: 2397 - DNA, 20 bp, synthetic construct
  misc_feature 1..20: note = B2M gRNA target site sequence
  source 1..20: mol_type = other DNA
ccaggcttcaccatgttggc

SEQ ID NO: 2398 - DNA, 20 bp, synthetic construct
  misc_feature 1..20: note = B2M gRNA target site sequence
  source 1..20: mol_type = other DNA
caggcttcaccatgttggcc

SEQ ID NO: 2399 - DNA, 20 bp, synthetic construct
  misc_feature 1..20: note = B2M gRNA target site sequence
  source 1..20: mol_type = other DNA
cttcaccatgttggccaggc

SEQ ID NO: 2400 - DNA, 20 bp, synthetic construct
  misc_feature 1..20: note = B2M gRNA target site sequence
  source 1..20: mol_type = other DNA
ggccaggctggtctcaacta

SEQ ID NO: 2401 - DNA, 20 bp, synthetic construct
  misc_feature 1..20: note = B2M gRNA target site sequence
  source 1..20: mol_type = other DNA
tggtctcaactacggacctc

SEQ ID NO: 2402 - DNA, 20 bp, synthetic construct
  misc_feature 1..20: note = B2M gRNA target site sequence
  source 1..20: mol_type = other DNA
ctcaagccatcctcccgcct

SEQ ID NO: 2403 - DNA, 20 bp, synthetic construct
  misc_feature 1..20: note = B2M gRNA target site sequence
  source 1..20: mol_type = other DNA
cctcccgcctcggcctccct

SEQ ID NO: 2404 - DNA, 20 bp, synthetic construct
  misc_feature 1..20: note = B2M gRNA target site sequence
  source 1..20: mol_type = other DNA
gcctcggcctccctaagtgc

SEQ ID NO: 2405 - DNA, 20 bp, synthetic construct
  misc_feature 1..20: note = B2M gRNA target site sequence
  source 1..20: mol_type = other DNA
cctcggcctccctaagtgct

SEQ ID NO: 2406 - DNA, 20 bp, synthetic construct
  misc_feature 1..20: note = B2M gRNA target site sequence
  source 1..20: mol_type = other DNA
ctccctaagtgctgggatta

SEQ ID NO: 2407 - DNA, 20 bp, synthetic construct
  misc_feature 1..20: note = B2M gRNA target site sequence
  source 1..20: mol_type = other DNA
tccctaagtgctgggattac

SEQ ID NO: 2408 - DNA, 20 bp, synthetic construct
  misc_feature 1..20: note = B2M gRNA target site sequence
  source 1..20: mol_type = other DNA
agtgctgggattacaggcgt

SEQ ID NO: 2409 - DNA, 20 bp, synthetic construct
  misc_feature 1..20: note = B2M gRNA target site sequence
  source 1..20: mol_type = other DNA
cctcatgttttcaaaaccga

SEQ ID NO: 2410 - DNA, 20 bp, synthetic construct
  misc_feature 1..20: note = B2M gRNA target site sequence
  source 1..20: mol_type = other DNA
atgttttcaaaaccgaaagt

SEQ ID NO: 2411 - DNA, 20 bp, synthetic construct
  misc_feature 1..20: note = B2M gRNA target site sequence
  source 1..20: mol_type = other DNA
gttttcaaaaccgaaagtaa

SEQ ID NO: 2412 - DNA, 20 bp, synthetic construct
  misc_feature 1..20: note = B2M gRNA target site sequence
  source 1..20: mol_type = other DNA
ttttcaaaaccgaaagtaag

SEQ ID NO: 2413 - DNA, 20 bp, synthetic construct
  misc_feature 1..20: note = B2M gRNA target site sequence
  source 1..20: mol_type = other DNA
aaaaccgaaagtaagaggca

SEQ ID NO: 2414 - DNA, 20 bp, synthetic construct
  misc_feature 1..20: note = B2M gRNA target site sequence
  source 1..20: mol_type = other DNA
gtaagaggcacagtacatct

SEQ ID NO: 2415 - DNA, 20 bp, synthetic construct
  misc_feature 1..20: note = B2M gRNA target site sequence
  source 1..20: mol_type = other DNA
cagtacatcttggaaacaac

SEQ ID NO: 2416 - DNA, 20 bp, synthetic construct
  misc_feature 1..20: note = B2M gRNA target site sequence
  source 1..20: mol_type = other DNA
agtacatcttggaaacaacc

SEQ ID NO: 2417 - DNA, 20 bp, synthetic construct
  misc_feature 1..20: note = B2M gRNA target site sequence
  source 1..20: mol_type = other DNA
atcttggaaacaaccaggca

SEQ ID NO: 2418 - DNA, 20 bp, synthetic construct
  misc_feature 1..20: note = B2M gRNA target site sequence
  source 1..20: mol_type = other DNA
cttggaaacaaccaggcaaa

SEQ ID NO: 2419 - DNA, 20 bp, synthetic construct
  misc_feature 1..20: note = B2M gRNA target site sequence
  source 1..20: mol_type = other DNA
aacaaccaggcaaagagcca

SEQ ID NO: 2420 - DNA, 20 bp, synthetic construct
  misc_feature 1..20: note = B2M gRNA target site sequence
  source 1..20: mol_type = other DNA
caaccaggcaaagagccaaa

SEQ ID NO: 2421 - DNA, 20 bp, synthetic construct
  misc_feature 1..20: note = B2M gRNA target site sequence
  source 1..20: mol_type = other DNA
aaccaggcaaagagccaaag

SEQ ID NO: 2422 - DNA, 20 bp, synthetic construct
  misc_feature 1..20: note = B2M gRNA target site sequence
  source 1..20: mol_type = other DNA
caggcaaagagccaaagagg

SEQ ID NO: 2423 - DNA, 20 bp, synthetic construct
  misc_feature 1..20: note = B2M gRNA target site sequence
  source 1..20: mol_type = other DNA
gaggaagccctctgtacgaa

SEQ ID NO: 2424 - DNA, 20 bp, synthetic construct
  misc_feature 1..20: note = B2M gRNA target site sequence
  source 1..20: mol_type = other DNA
ccctctgtacgaaaagacca

SEQ ID NO: 2425 - DNA, 20 bp, synthetic construct
  misc_feature 1..20: note = B2M gRNA target site sequence
  source 1..20: mol_type = other DNA
cctctgtacgaaaagaccac

SEQ ID NO: 2426 - DNA, 20 bp, synthetic construct
  misc_feature 1..20: note = B2M gRNA target site sequence
  source 1..20: mol_type = other DNA
ctctgtacgaaaagaccaca

SEQ ID NO: 2427 - DNA, 20 bp, synthetic construct
  misc_feature 1..20: note = B2M gRNA target site sequence
  source 1..20: mol_type = other DNA
accacagggcccatgccgcc

SEQ ID NO: 2428 - DNA, 20 bp, synthetic construct
  misc_feature 1..20: note = B2M gRNA target site sequence
  source 1..20: mol_type = other DNA
ccatgccgcccagtttgctc

SEQ ID NO: 2429 - DNA, 20 bp, synthetic construct
  misc_feature 1..20: note = B2M gRNA target site sequence
  source 1..20: mol_type = other DNA
atgccgcccagtttgctctg

SEQ ID NO: 2430 - DNA, 20 bp, synthetic construct
  misc_feature 1..20: note = B2M gRNA target site sequence
  source 1..20: mol_type = other DNA
ttgctctggagaatctcacg

SEQ ID NO: 2431 - DNA, 20 bp, synthetic construct
  misc_feature 1..20: note = B2M gRNA target site sequence
  source 1..20: mol_type = other DNA
ctctggagaatctcacgcag

SEQ ID NO: 2432 - DNA, 20 bp, synthetic construct
  misc_feature 1..20: note = B2M gRNA target site sequence
  source 1..20: mol_type = other DNA
tctggagaatctcacgcaga

SEQ ID NO: 2433 - DNA, 20 bp, synthetic construct
  misc_feature 1..20: note = B2M gRNA target site sequence
  source 1..20: mol_type = other DNA
ggagaatctcacgcagaagg

SEQ ID NO: 2434 - DNA, 20 bp, synthetic construct
  misc_feature 1..20: note = B2M gRNA target site sequence
  source 1..20: mol_type = other DNA
gagaatctcacgcagaaggc

SEQ ID NO: 2435 - DNA, 20 bp, synthetic construct
  misc_feature 1..20: note = B2M gRNA target site sequence
  source 1..20: mol_type = other DNA
aaaaaaaaatgcacgaatta

SEQ ID NO: 2436 - DNA, 20 bp, synthetic construct
  misc_feature 1..20: note = B2M gRNA target site sequence
  source 1..20: mol_type = other DNA
aatgcacgaattacagccaa

SEQ ID NO: 2437 - DNA, 20 bp, synthetic construct
  misc_feature 1..20: note = B2M gRNA target site sequence
  source 1..20: mol_type = other DNA
atgcacgaattacagccaaa

SEQ ID NO: 2438 - DNA, 20 bp, synthetic construct
  misc_feature 1..20: note = B2M gRNA target site sequence
  source 1..20: mol_type = other DNA
aaaggcatgcgctcccgcaa

SEQ ID NO: 2439 - DNA, 20 bp, synthetic construct
  misc_feature 1..20: note = B2M gRNA target site sequence
  source 1..20: mol_type = other DNA
atgcgctcccgcaaaagccc

SEQ ID NO: 2440 - DNA, 20 bp, synthetic construct
  misc_feature 1..20: note = B2M gRNA target site sequence
  source 1..20: mol_type = other DNA
gctcccgcaaaagccctggt

SEQ ID NO: 2441 - DNA, 20 bp, synthetic construct
  misc_feature 1..20: note = B2M gRNA target site sequence
  source 1..20: mol_type = other DNA
ctcccgcaaaagccctggtt

SEQ ID NO: 2442 - DNA, 20 bp, synthetic construct
  misc_feature 1..20: note = B2M gRNA target site sequence
  source 1..20: mol_type = other DNA
catttatcccctgtgtaatt

SEQ ID NO: 2443 - DNA, 20 bp, synthetic construct
  misc_feature 1..20: note = B2M gRNA target site sequence
  source 1..20: mol_type = other DNA
aattaagtttcttaaaatct

SEQ ID NO: 2444 - DNA, 20 bp, synthetic construct
  misc_feature 1..20: note = B2M gRNA target site sequence
  source 1..20: mol_type = other DNA
ttcttaaaatctcggtgcct

SEQ ID NO: 2445 - DNA, 20 bp, synthetic construct
  misc_feature 1..20: note = B2M gRNA target site sequence
  source 1..20: mol_type = other DNA
gccttagtttcttcatctgt

SEQ ID NO: 2446 - DNA, 20 bp, synthetic construct
  misc_feature 1..20: note = B2M gRNA target site sequence
  source 1..20: mol_type = other DNA
cttagtttcttcatctgtga

SEQ ID NO: 2447 - DNA, 20 bp, synthetic construct
  misc_feature 1..20: note = B2M gRNA target site sequence
  source 1..20: mol_type = other DNA
ttagtttcttcatctgtgag

SEQ ID NO: 2448 - DNA, 20 bp, synthetic construct
  misc_feature 1..20: note = B2M gRNA target site sequence
  source 1..20: mol_type = other DNA
gtttcttcatctgtgagagg

SEQ ID NO: 2449 - DNA, 20 bp, synthetic construct
  misc_feature 1..20: note = B2M gRNA target site sequence
  source 1..20: mol_type = other DNA
tcttcatctgtgagaggcag

SEQ ID NO: 2450 - DNA, 20 bp, synthetic construct
  misc_feature 1..20: note = B2M gRNA target site sequence
  source 1..20: mol_type = other DNA
tgagaggcagaagataacca

SEQ ID NO: 2451 - DNA, 20 bp, synthetic construct
  misc_feature 1..20: note = B2M gRNA target site sequence
  source 1..20: mol_type = other DNA
gaggcagaagataaccatag

SEQ ID NO: 2452 - DNA, 20 bp, synthetic construct
  misc_feature 1..20: note = B2M gRNA target site sequence
  source 1..20: mol_type = other DNA
ataaccatagtagttatcta

SEQ ID NO: 2453 - DNA, 20 bp, synthetic construct
  misc_feature 1..20: note = B2M gRNA target site sequence
  source 1..20: mol_type = other DNA
accatagtagttatctatgg

SEQ ID NO: 2454 - DNA, 20 bp, synthetic construct
  misc_feature 1..20: note = B2M gRNA target site sequence
  source 1..20: mol_type = other DNA
atagtagttatctatggcgg

SEQ ID NO: 2455 - DNA, 20 bp, synthetic construct
  misc_feature 1..20: note = B2M gRNA target site sequence
  source 1..20: mol_type = other DNA
tttcaaaattaaatgacgca

SEQ ID NO: 2456 - DNA, 20 bp, synthetic construct
  misc_feature 1..20: note = B2M gRNA target site sequence
  source 1..20: mol_type = other DNA
taaatgacgcaaagcacata

SEQ ID NO: 2457 - DNA, 20 bp, synthetic construct
  misc_feature 1..20: note = B2M gRNA target site sequence
  source 1..20: mol_type = other DNA
cgcaaagcacataaagtcct

SEQ ID NO: 2458 - DNA, 20 bp, synthetic construct
  misc_feature 1..20: note = B2M gRNA target site sequence
  source 1..20: mol_type = other DNA
cacataaagtccttggcaca

SEQ ID NO: 2459 - DNA, 20 bp, synthetic construct
  misc_feature 1..20: note = B2M gRNA target site sequence
  source 1..20: mol_type = other DNA
taaagtccttggcacacaga

SEQ ID NO: 2460 - DNA, 20 bp, synthetic construct
  misc_feature 1..20: note = B2M gRNA target site sequence
  source 1..20: mol_type = other DNA
acacagaaagatgtcaataa

SEQ ID NO: 2461 - DNA, 20 bp, synthetic construct
  misc_feature 1..20: note = B2M gRNA target site sequence
  source 1..20: mol_type = other DNA
cacagaaagatgtcaataac

SEQ ID NO: 2462 - DNA, 20 bp, synthetic construct
  misc_feature 1..20: note = B2M gRNA target site sequence
  source 1..20: mol_type = other DNA
agaaagatgtcaataacggg

SEQ ID NO: 2463 - DNA, 20 bp, synthetic construct
  misc_feature 1..20: note = B2M gRNA target site sequence
  source 1..20: mol_type = other DNA
tagttcttataattttttaa

SEQ ID NO: 2464 - DNA, 20 bp, synthetic construct
  misc_feature 1..20: note = B2M gRNA target site sequence
  source 1..20: mol_type = other DNA
tttttaaaagtgacatgtga

SEQ ID NO: 2465 - DNA, 20 bp, synthetic construct
  misc_feature 1..20: note = B2M gRNA target site sequence
  source 1..20: mol_type = other DNA
ttttaaaagtgacatgtgat

SEQ ID NO: 2466 - DNA, 20 bp, synthetic construct
  misc_feature 1..20: note = B2M gRNA target site sequence
  source 1..20: mol_type = other DNA
gacatgtgatgggaacaaat

SEQ ID NO: 2467 - DNA, 20 bp, synthetic construct
  misc_feature 1..20: note = B2M gRNA target site sequence
  source 1..20: mol_type = other DNA
ttcgaaaccgctttgtatca

SEQ ID NO: 2468 - DNA, 20 bp, synthetic construct
  misc_feature 1..20: note = B2M gRNA target site sequence
  source 1..20: mol_type = other DNA
aaccgctttgtatcacagcc

SEQ ID NO: 2469 - DNA, 20 bp, synthetic construct
  misc_feature 1..20: note = B2M gRNA target site sequence
  source 1..20: mol_type = other DNA
cgcgtgctgtttcctcccca

SEQ ID NO: 2470 - DNA, 20 bp, synthetic construct
  misc_feature 1..20: note = B2M gRNA target site sequence
  source 1..20: mol_type = other DNA
gctgtttcctccccacggtg

SEQ ID NO: 2471 - DNA, 20 bp, synthetic construct
  misc_feature 1..20: note = B2M gRNA target site sequence
  source 1..20: mol_type = other DNA
ccccacggtgtggccccaca

SEQ ID NO: 2472 - DNA, 20 bp, synthetic construct
  misc_feature 1..20: note = B2M gRNA target site sequence
  source 1..20: mol_type = other DNA
ggtgtggccccacatagacc

SEQ ID NO: 2473 - DNA, 20 bp, synthetic construct
  misc_feature 1..20: note = B2M gRNA target site sequence
  source 1..20: mol_type = other DNA
tgtggccccacatagaccca

SEQ ID NO: 2474 - DNA, 20 bp, synthetic construct
  misc_feature 1..20: note = B2M gRNA target site sequence
  source 1..20: mol_type = other DNA
gtggccccacatagacccag

SEQ ID NO: 2475 - DNA, 20 bp, synthetic construct
  misc_feature 1..20: note = B2M gRNA target site sequence
  source 1..20: mol_type = other DNA
ccacatagacccagaggtgc

SEQ ID NO: 2476 - DNA, 20 bp, synthetic construct
  misc_feature 1..20: note = B2M gRNA target site sequence
  source 1..20: mol_type = other DNA
cacatagacccagaggtgct

SEQ ID NO: 2477 - DNA, 20 bp, synthetic construct
  misc_feature 1..20: note = B2M gRNA target site sequence
  source 1..20: mol_type = other DNA
ggtgctaggacatgcgaact

SEQ ID NO: 2478 - DNA, 20 bp, synthetic construct
  misc_feature 1..20: note = B2M gRNA target site sequence
  source 1..20: mol_type = other DNA
gctaggacatgcgaacttag

SEQ ID NO: 2479 - DNA, 20 bp, synthetic construct
  misc_feature 1..20: note = B2M gRNA target site sequence
  source 1..20: mol_type = other DNA
ctaggacatgcgaacttagc

SEQ ID NO: 2480 - DNA, 20 bp, synthetic construct
  misc_feature 1..20: note = B2M gRNA target site sequence
  source 1..20: mol_type = other DNA
atgcgaacttagcgggcgcc

SEQ ID NO: 2481 - DNA, 20 bp, synthetic construct
  misc_feature 1..20: note = B2M gRNA target site sequence
  source 1..20: mol_type = other DNA
acttagcgggcgcctagacg

SEQ ID NO: 2482 - DNA, 20 bp, synthetic construct
  misc_feature 1..20: note = B2M gRNA target site sequence
  source 1..20: mol_type = other DNA
gggcgcctagacgaagtcca

SEQ ID NO: 2483 - DNA, 20 bp, synthetic construct
  misc_feature 1..20: note = B2M gRNA target site sequence
  source 1..20: mol_type = other DNA
agacgaagtccacagctctc

SEQ ID NO: 2484 - DNA, 20 bp, synthetic construct
  misc_feature 1..20: note = B2M gRNA target site sequence
  source 1..20: mol_type = other DNA
agtccacagctctccagtct

SEQ ID NO: 2485 - DNA, 20 bp, synthetic construct
  misc_feature 1..20: note = B2M gRNA target site sequence
  source 1..20: mol_type = other DNA
gtccacagctctccagtcta

SEQ ID NO: 2486 - DNA, 20 bp, synthetic construct
  misc_feature 1..20: note = B2M gRNA target site sequence
  source 1..20: mol_type = other DNA
tccacagctctccagtctaa

SEQ ID NO: 2487 - DNA, 20 bp, synthetic construct
  misc_feature 1..20: note = B2M gRNA target site sequence
  source 1..20: mol_type = other DNA
acagctctccagtctaaggg

SEQ ID NO: 2488 - DNA, 20 bp, synthetic construct
  misc_feature 1..20: note = B2M gRNA target site sequence
  source 1..20: mol_type = other DNA
gctctccagtctaagggaag

SEQ ID NO: 2489 - DNA, 20 bp, synthetic construct
  misc_feature 1..20: note = B2M gRNA target site sequence
  source 1..20: mol_type = other DNA
tctccagtctaagggaagca

SEQ ID NO: 2490 - DNA, 20 bp, synthetic construct
  misc_feature 1..20: note = B2M gRNA target site sequence
  source 1..20: mol_type = other DNA
gtctaagggaagcagagccg

SEQ ID NO: 2491 - DNA, 20 bp, synthetic construct
  misc_feature 1..20: note = B2M gRNA target site sequence
  source 1..20: mol_type = other DNA
taagggaagcagagccgcag

SEQ ID NO: 2492 - DNA, 20 bp, synthetic construct
  misc_feature 1..20: note = B2M gRNA target site sequence
  source 1..20: mol_type = other DNA
ggaagcagagccgcagcaga

SEQ ID NO: 2493 - DNA, 20 bp, synthetic construct
  misc_feature 1..20: note = B2M gRNA target site sequence
  source 1..20: mol_type = other DNA
gaagcagagccgcagcagac

SEQ ID NO: 2494 - DNA, 20 bp, synthetic construct
  misc_feature 1..20: note = B2M gRNA target site sequence
  source 1..20: mol_type = other DNA
ccgcagcagacaggcttacc

SEQ ID NO: 2495 - DNA, 20 bp, synthetic construct
  misc_feature 1..20: note = B2M gRNA target site sequence
  source 1..20: mol_type = other DNA
cgcagcagacaggcttaccc

SEQ ID NO: 2496 - DNA, 20 bp, synthetic construct
  misc_feature 1..20: note = B2M gRNA target site sequence
  source 1..20: mol_type = other DNA
tacccgggcgacgcctcccc

SEQ ID NO: 2497 - DNA, 20 bp, synthetic construct
  misc_feature 1..20: note = B2M gRNA target site sequence
  source 1..20: mol_type = other DNA
cgacgcctcccccagacccc

SEQ ID NO: 2498 - DNA, 20 bp, synthetic construct
  misc_feature 1..20: note = B2M gRNA target site sequence
  source 1..20: mol_type = other DNA
ctccacgcgttcacaaacct

SEQ ID NO: 2499 - DNA, 20 bp, synthetic construct
  misc_feature 1..20: note = B2M gRNA target site sequence
  source 1..20: mol_type = other DNA
aaacctcagcgccgcgcctt

SEQ ID NO: 2500 - DNA, 20 bp, synthetic construct
  misc_feature 1..20: note = B2M gRNA target site sequence
  source 1..20: mol_type = other DNA
aacctcagcgccgcgccttt

SEQ ID NO: 2501 - DNA, 20 bp, synthetic construct
  misc_feature 1..20: note = B2M gRNA target site sequence
  source 1..20: mol_type = other DNA
cagcgccgcgcctttgggac

SEQ ID NO: 2502 - DNA, 20 bp, synthetic construct
  misc_feature 1..20: note = B2M gRNA target site sequence
  source 1..20: mol_type = other DNA
agcctacccgtcccccactc

SEQ ID NO: 2503 - DNA, 20 bp, synthetic construct
  misc_feature 1..20: note = B2M gRNA target site sequence
  source 1..20: mol_type = other DNA
gtcccccactccagctgcgc

SEQ ID NO: 2504 - DNA, 20 bp, synthetic construct
  misc_feature 1..20: note = B2M gRNA target site sequence
  source 1..20: mol_type = other DNA
tcccccactccagctgcgct

SEQ ID NO: 2505 - DNA, 20 bp, synthetic construct
  misc_feature 1..20: note = B2M gRNA target site sequence
  source 1..20: mol_type = other DNA
cccccactccagctgcgctg

SEQ ID NO: 2506 - DNA, 20 bp, synthetic construct
  misc_feature 1..20: note = B2M gRNA target site sequence
  source 1..20: mol_type = other DNA
ccccactccagctgcgctgg

SEQ ID NO: 2507 - DNA, 20 bp, synthetic construct
  misc_feature 1..20: note = B2M gRNA target site sequence
  source 1..20: mol_type = other DNA
ccactccagctgcgctgggg

SEQ ID NO: 2508 - DNA, 20 bp, synthetic construct
  misc_feature 1..20: note = B2M gRNA target site sequence
  source 1..20: mol_type = other DNA
tccagctgcgctgggggagc

SEQ ID NO: 2509 - DNA, 20 bp, synthetic construct
  misc_feature 1..20: note = B2M gRNA target site sequence
  source 1..20: mol_type = other DNA
cagctgcgctgggggagcca

SEQ ID NO: 2510 - DNA, 20 bp, synthetic construct
  misc_feature 1..20: note = B2M gRNA target site sequence
  source 1..20: mol_type = other DNA
agctgcgctgggggagccag

SEQ ID NO: 2511 - DNA, 20 bp, synthetic construct
  misc_feature 1..20: note = B2M gRNA target site sequence
  source 1..20: mol_type = other DNA
gggagccagaggccccgcga

SEQ ID NO: 2512 - DNA, 20 bp, synthetic construct
  misc_feature 1..20: note = B2M gRNA target site sequence
  source 1..20: mol_type = other DNA
gagccagaggccccgcgaaa

SEQ ID NO: 2513 - DNA, 20 bp, synthetic construct
  misc_feature 1..20: note = B2M gRNA target site sequence
  source 1..20: mol_type = other DNA
ccagaggccccgcgaaagag

SEQ ID NO: 2514 - DNA, 20 bp, synthetic construct
  misc_feature 1..20: note = B2M gRNA target site sequence
  source 1..20: mol_type = other DNA
gaggccccgcgaaagagcgg

SEQ ID NO: 2515 - DNA, 20 bp, synthetic construct
  misc_feature 1..20: note = B2M gRNA target site sequence
  source 1..20: mol_type = other DNA
ggccccgcgaaagagcggaa

SEQ ID NO: 2516 - DNA, 20 bp, synthetic construct
  misc_feature 1..20: note = B2M gRNA target site sequence
  source 1..20: mol_type = other DNA
gagaaaccctcccccaacct

SEQ ID NO: 2517 - DNA, 20 bp, synthetic construct
  misc_feature 1..20: note = B2M gRNA target site sequence
  source 1..20: mol_type = other DNA
tcccgaccctcccgtcgccg

SEQ ID NO: 2518 - DNA, 20 bp, synthetic construct
  misc_feature 1..20: note = B2M gRNA target site sequence
  source 1..20: mol_type = other DNA
cccgaccctcccgtcgccgt

SEQ ID NO: 2519 - DNA, 20 bp, synthetic construct
  misc_feature 1..20: note = B2M gRNA target site sequence
  source 1..20: mol_type = other DNA
cctcccgtcgccgtaggcca

SEQ ID NO: 2520 - DNA, 20 bp, synthetic construct
  misc_feature 1..20: note = B2M gRNA target site sequence
  source 1..20: mol_type = other DNA
ctcccgtcgccgtaggccaa

SEQ ID NO: 2521 - DNA, 20 bp, synthetic construct
  misc_feature 1..20: note = B2M gRNA target site sequence
  source 1..20: mol_type = other DNA
tctcccctgctccccgccga

SEQ ID NO: 2522 - DNA, 20 bp, synthetic construct
  misc_feature 1..20: note = B2M gRNA target site sequence
  source 1..20: mol_type = other DNA
ctcccctgctccccgccgaa

SEQ ID NO: 2523 - DNA, 20 bp, synthetic construct
  misc_feature 1..20: note = B2M gRNA target site sequence
  source 1..20: mol_type = other DNA
tcccctgctccccgccgaaa

SEQ ID NO: 2524 - DNA, 20 bp, synthetic construct
  misc_feature 1..20: note = B2M gRNA target site sequence
  source 1..20: mol_type = other DNA
cccctgctccccgccgaaag

SEQ ID NO: 2525 - DNA, 20 bp, synthetic construct
  misc_feature 1..20: note = B2M gRNA target site sequence
  source 1..20: mol_type = other DNA
tgctccccgccgaaaggggc

SEQ ID NO: 2526 - DNA, 20 bp, synthetic construct
  misc_feature 1..20: note = B2M gRNA target site sequence
  source 1..20: mol_type = other DNA
tccccgccgaaaggggcaag

SEQ ID NO: 2527 - DNA, 20 bp, synthetic construct
  misc_feature 1..20: note = B2M gRNA target site sequence
  source 1..20: mol_type = other DNA
ggggcaagtagcgcgcgtcc

SEQ ID NO: 2528 - DNA, 20 bp, synthetic construct
  misc_feature 1..20: note = B2M gRNA target site sequence
  source 1..20: mol_type = other DNA
gggcaagtagcgcgcgtccc

SEQ ID NO: 2529 - DNA, 20 bp, synthetic construct
  misc_feature 1..20: note = B2M gRNA target site sequence
  source 1..20: mol_type = other DNA
cgcacccccttccccactcc

SEQ ID NO: 2530 - DNA, 20 bp, synthetic construct
  misc_feature 1..20: note = B2M gRNA target site sequence
  source 1..20: mol_type = other DNA
gcacccccttccccactccc

SEQ ID NO: 2531 - DNA, 20 bp, synthetic construct
  misc_feature 1..20: note = B2M gRNA target site sequence
  source 1..20: mol_type = other DNA
ggccaccccgccgcttcccc

SEQ ID NO: 2532 - DNA, 20 bp, synthetic construct
  misc_feature 1..20: note = B2M gRNA target site sequence
  source 1..20: mol_type = other DNA
cccgccgcttccccgagatc

SEQ ID NO: 2533 - DNA, 20 bp, synthetic construct
  misc_feature 1..20: note = B2M gRNA target site sequence
  source 1..20: mol_type = other DNA
gcttccccgagatccagccc

SEQ ID NO: 2534 - DNA, 20 bp, synthetic construct
  misc_feature 1..20: note = B2M gRNA target site sequence
  source 1..20: mol_type = other DNA
cccgagatccagccctggac

SEQ ID NO: 2535 - DNA, 20 bp, synthetic construct
  misc_feature 1..20: note = B2M gRNA target site sequence
  source 1..20: mol_type = other DNA
ccagccctggactagcccca

SEQ ID NO: 2536 - DNA, 20 bp, synthetic construct
  misc_feature 1..20: note = B2M gRNA target site sequence
  source 1..20: mol_type = other DNA
gccctggactagccccacgg

SEQ ID NO: 2537 - DNA, 20 bp, synthetic construct
  misc_feature 1..20: note = B2M gRNA target site sequence
  source 1..20: mol_type = other DNA
ccctggactagccccacggc

SEQ ID NO: 2538 - DNA, 20 bp, synthetic construct
  misc_feature 1..20: note = B2M gRNA target site sequence
  source 1..20: mol_type = other DNA
tagccccacggcgggccacc

SEQ ID NO: 2539 - DNA, 20 bp, synthetic construct
  misc_feature 1..20: note = B2M gRNA target site sequence
  source 1..20: mol_type = other DNA
agccccacggcgggccacca

SEQ ID NO: 2540 - DNA, 20 bp, synthetic construct
  misc_feature 1..20: note = B2M gRNA target site sequence
  source 1..20: mol_type = other DNA
ccccacggcgggccaccaag

SEQ ID NO: 2541 - DNA, 20 bp, synthetic construct
  misc_feature 1..20: note = B2M gRNA target site sequence
  source 1..20: mol_type = other DNA
gcgggccaccaaggagaact

SEQ ID NO: 2542 - DNA, 20 bp, synthetic construct
  misc_feature 1..20: note = B2M gRNA target site sequence
  source 1..20: mol_type = other DNA
gggccaccaaggagaacttg

SEQ ID NO: 2543 - DNA, 20 bp, synthetic construct
  misc_feature 1..20: note = B2M gRNA target site sequence
  source 1..20: mol_type = other DNA
ccaccaaggagaacttggag

SEQ ID NO: 2544 - DNA, 20 bp, synthetic construct
  misc_feature 1..20: note = B2M gRNA target site sequence
  source 1..20: mol_type = other DNA
caccaaggagaacttggaga

SEQ ID NO: 2545 - DNA, 20 bp, synthetic construct
  misc_feature 1..20: note = B2M gRNA target site sequence
  source 1..20: mol_type = other DNA
accaaggagaacttggagaa

SEQ ID NO: 2546 - DNA, 20 bp, synthetic construct
  misc_feature 1..20: note = B2M gRNA target site sequence
  source 1..20: mol_type = other DNA
aaggagaacttggagaaggg

SEQ ID NO: 2547 - DNA, 20 bp, synthetic construct
  misc_feature 1..20: note = B2M gRNA target site sequence
  source 1..20: mol_type = other DNA
aacttggagaagggaagtca

SEQ ID NO: 2548 - DNA, 20 bp, synthetic construct
  misc_feature 1..20: note = B2M gRNA target site sequence
  source 1..20: mol_type = other DNA
cttggagaagggaagtcacg

SEQ ID NO: 2549 - DNA, 20 bp, synthetic construct
  misc_feature 1..20: note = B2M gRNA target site sequence
  source 1..20: mol_type = other DNA
gagaagggaagtcacggagc

SEQ ID NO: 2550 - DNA, 20 bp, synthetic construct
  misc_feature 1..20: note = B2M gRNA target site sequence
  source 1..20: mol_type = other DNA
gaagggaagtcacggagcga

SEQ ID NO: 2551 - DNA, 20 bp, synthetic construct
  misc_feature 1..20: note = B2M gRNA target site sequence
  source 1..20: mol_type = other DNA
agggaagtcacggagcgaga

SEQ ID NO: 2552 - DNA, 20 bp, synthetic construct
  misc_feature 1..20: note = B2M gRNA target site sequence
  source 1..20: mol_type = other DNA
agtcacggagcgagagagca

SEQ ID NO: 2553 - DNA, 20 bp, synthetic construct
  misc_feature 1..20: note = B2M gRNA target site sequence
  source 1..20: mol_type = other DNA
acggagcgagagagcacagc

SEQ ID NO: 2554 - DNA, 20 bp, synthetic construct
  misc_feature 1..20: note = B2M gRNA target site sequence
  source 1..20: mol_type = other DNA
cggagcgagagagcacagcg

SEQ ID NO: 2555 - DNA, 20 bp, synthetic construct
  misc_feature 1..20: note = B2M gRNA target site sequence
  source 1..20: mol_type = other DNA
ggagcgagagagcacagcga

SEQ ID NO: 2556 - DNA, 20 bp, synthetic construct
  misc_feature 1..20: note = B2M gRNA target site sequence
  source 1..20: mol_type = other DNA
agagagcacagcgagggcca

SEQ ID NO: 2557 - DNA, 20 bp, synthetic construct
  misc_feature 1..20: note = B2M gRNA target site sequence
  source 1..20: mol_type = other DNA
agagcacagcgagggccaca

SEQ ID NO: 2558 - DNA, 20 bp, synthetic construct
  misc_feature 1..20: note = B2M gRNA target site sequence
  source 1..20: mol_type = other DNA
gagcacagcgagggccacag

SEQ ID NO: 2559 - DNA, 20 bp, synthetic construct
  misc_feature 1..20: note = B2M gRNA target site sequence
  source 1..20: mol_type = other DNA
agcacagcgagggccacaga

SEQ ID NO: 2560 - DNA, 20 bp, synthetic construct
  misc_feature 1..20: note = B2M gRNA target site sequence
  source 1..20: mol_type = other DNA
agcgagggccacagagggtg

SEQ ID NO: 2561 - DNA, 20 bp, synthetic construct
  misc_feature 1..20: note = B2M gRNA target site sequence
  source 1..20: mol_type = other DNA
cgagggccacagagggtgca

SEQ ID NO: 2562 - DNA, 20 bp, synthetic construct
  misc_feature 1..20: note = B2M gRNA target site sequence
  source 1..20: mol_type = other DNA
gggccacagagggtgcagag

SEQ ID NO: 2563 - DNA, 20 bp, synthetic construct
  misc_feature 1..20: note = B2M gRNA target site sequence
  source 1..20: mol_type = other DNA
ggccacagagggtgcagagc

SEQ ID NO: 2564 - DNA, 20 bp, synthetic construct
  misc_feature 1..20: note = B2M gRNA target site sequence
  source 1..20: mol_type = other DNA
ccacagagggtgcagagcgg

SEQ ID NO: 2565 - DNA, 20 bp, synthetic construct
  misc_feature 1..20: note = B2M gRNA target site sequence
  source 1..20: mol_type = other DNA
acagagggtgcagagcggga

SEQ ID NO: 2566 - DNA, 20 bp, synthetic construct
  misc_feature 1..20: note = B2M gRNA target site sequence
  source 1..20: mol_type = other DNA
cagagggtgcagagcgggag

SEQ ID NO: 2567 - DNA, 20 bp, synthetic construct
  misc_feature 1..20: note = B2M gRNA target site sequence
  source 1..20: mol_type = other DNA
agggtgcagagcgggagagg

SEQ ID NO: 2568 - DNA, 20 bp, synthetic construct
  misc_feature 1..20: note = B2M gRNA target site sequence
  source 1..20: mol_type = other DNA
gggtgcagagcgggagagga

SEQ ID NO: 2569 - DNA, 20 bp, synthetic construct
  misc_feature 1..20: note = B2M gRNA target site sequence
  source 1..20: mol_type = other DNA
cagagcgggagaggaaggac

SEQ ID NO: 2570 - DNA, 20 bp, synthetic construct
  misc_feature 1..20: note = B2M gRNA target site sequence
  source 1..20: mol_type = other DNA
gagcgggagaggaaggacca

SEQ ID NO: 2571 - DNA, 20 bp, synthetic construct
  misc_feature 1..20: note = B2M gRNA target site sequence
  source 1..20: mol_type = other DNA
cgggagaggaaggaccagag

SEQ ID NO: 2572 - DNA, 20 bp, synthetic construct
  misc_feature 1..20: note = B2M gRNA target site sequence
  source 1..20: mol_type = other DNA
gggagaggaaggaccagagc

SEQ ID NO: 2573 - DNA, 20 bp, synthetic construct
  misc_feature 1..20: note = B2M gRNA target site sequence
  source 1..20: mol_type = other DNA
gagaggaaggaccagagcgg

SEQ ID NO: 2574 - DNA, 20 bp, synthetic construct
  misc_feature 1..20: note = B2M gRNA target site sequence
  source 1..20: mol_type = other DNA
agaggaaggaccagagcggg

SEQ ID NO: 2575 - DNA, 20 bp, synthetic construct
  misc_feature 1..20: note = B2M gRNA target site sequence
  source 1..20: mol_type = other DNA
gaggaaggaccagagcggga

SEQ ID NO: 2576 - DNA, 20 bp, synthetic construct
  misc_feature 1..20: note = B2M gRNA target site sequence
  source 1..20: mol_type = other DNA
gaaggaccagagcgggaggg

SEQ ID NO: 2577 - DNA, 20 bp, synthetic construct
  misc_feature 1..20: note = B2M gRNA target site sequence
  source 1..20: mol_type = other DNA
aaggaccagagcgggagggt

SEQ ID NO: 2578 - DNA, 20 bp, synthetic construct
  misc_feature 1..20: note = B2M gRNA target site sequence
  source 1..20: mol_type = other DNA
ggaccagagcgggagggtag

SEQ ID NO: 2579 - DNA, 20 bp, synthetic construct
  misc_feature 1..20: note = B2M gRNA target site sequence
  source 1..20: mol_type = other DNA
accagagcgggagggtagga

SEQ ID NO: 2580 - DNA, 20 bp, synthetic construct
  misc_feature 1..20: note = B2M gRNA target site sequence
  source 1..20: mol_type = other DNA
agggtaggagagactcacgc

SEQ ID NO: 2581 - DNA, 20 bp, synthetic construct
  misc_feature 1..20: note = B2M gRNA target site sequence
  source 1..20: mol_type = other DNA
taggagagactcacgctgga

SEQ ID NO: 2582 - DNA, 20 bp, synthetic construct
  misc_feature 1..20: note = B2M gRNA target site sequence
  source 1..20: mol_type = other DNA
gactcacgctggatagcctc

SEQ ID NO: 2583 - DNA, 20 bp, synthetic construct
  misc_feature 1..20: note = B2M gRNA target site sequence
  source 1..20: mol_type = other DNA
actcacgctggatagcctcc

SEQ ID NO: 2584 - DNA, 20 bp, synthetic construct
  misc_feature 1..20: note = B2M gRNA target site sequence
  source 1..20: mol_type = other DNA
acgctggatagcctccaggc

SEQ ID NO: 2585 - DNA, 20 bp, synthetic construct
  misc_feature 1..20: note = B2M gRNA target site sequence
  source 1..20: mol_type = other DNA
tggatagcctccaggccaga

SEQ ID NO: 2586 - DNA, 20 bp, synthetic construct
  misc_feature 1..20: note = B2M gRNA target site sequence
  source 1..20: mol_type = other DNA
gatagcctccaggccagaaa

SEQ ID NO: 2587 - DNA, 20 bp, synthetic construct
  misc_feature 1..20: note = B2M gRNA target site sequence
  source 1..20: mol_type = other DNA
tagcctccaggccagaaaga

SEQ ID NO: 2588 - DNA, 20 bp, synthetic construct
  misc_feature 1..20: note = B2M gRNA target site sequence
  source 1..20: mol_type = other DNA
gcctccaggccagaaagaga

SEQ ID NO: 2589 - DNA, 20 bp, synthetic construct
  misc_feature 1..20: note = B2M gRNA target site sequence
  source 1..20: mol_type = other DNA
tccaggccagaaagagagag

SEQ ID NO: 2590 - DNA, 20 bp, synthetic construct
  misc_feature 1..20: note = B2M gRNA target site sequence
  source 1..20: mol_type = other DNA
ccagaaagagagagtagcgc

SEQ ID NO: 2591 - DNA, 20 bp, synthetic construct
  misc_feature 1..20: note = B2M gRNA target site sequence
  source 1..20: mol_type = other DNA
aagagagagtagcgcgagca

SEQ ID NO: 2592 - DNA, 20 bp, synthetic construct
  misc_feature 1..20: note = B2M gRNA target site sequence
  source 1..20: mol_type = other DNA
agagtagcgcgagcacagct

SEQ ID NO: 2593 - DNA, 20 bp, synthetic construct
  misc_feature 1..20: note = B2M gRNA target site sequence
  source 1..20: mol_type = other DNA
gagtagcgcgagcacagcta

SEQ ID NO: 2594 - DNA, 20 bp, synthetic construct
  misc_feature 1..20: note = B2M gRNA target site sequence
  source 1..20: mol_type = other DNA
cgcgagcacagctaaggcca

SEQ ID NO: 2595 - DNA, 20 bp, synthetic construct
  misc_feature 1..20: note = B2M gRNA target site sequence
  source 1..20: mol_type = other DNA
cgagcacagctaaggccacg

SEQ ID NO: 2596 - DNA, 20 bp, synthetic construct
  misc_feature 1..20: note = B2M gRNA target site sequence
  source 1..20: mol_type = other DNA
cacagctaaggccacggagc

SEQ ID NO: 2597 - DNA, 20 bp, synthetic construct
  misc_feature 1..20: note = B2M gRNA target site sequence
  source 1..20: mol_type = other DNA
ggccacggagcgagacatct

SEQ ID NO: 2598 - DNA, 20 bp, synthetic construct
  misc_feature 1..20: note = B2M gRNA target site sequence
  source 1..20: mol_type = other DNA
catctcggcccgaatgctgt

SEQ ID NO: 2599 - DNA, 20 bp, synthetic construct
  misc_feature 1..20: note = B2M gRNA target site sequence
  source 1..20: mol_type = other DNA
ggcccgaatgctgtcagctt

SEQ ID NO: 2600 - DNA, 20 bp, synthetic construct
  misc_feature 1..20: note = B2M gRNA target site sequence
  source 1..20: mol_type = other DNA
gcccgaatgctgtcagcttc

SEQ ID NO: 2601 - DNA, 20 bp, synthetic construct
  misc_feature 1..20: note = B2M gRNA target site sequence
  source 1..20: mol_type = other DNA
tcagcttcaggaatgcccgc

SEQ ID NO: 2602 - DNA, 20 bp, synthetic construct
  misc_feature 1..20: note = B2M gRNA target site sequence
  source 1..20: mol_type = other DNA
acttatattaaacgcgtgcc

SEQ ID NO: 2603 - DNA, 20 bp, synthetic construct
  misc_feature 1..20: note = B2M gRNA target site sequence
  source 1..20: mol_type = other DNA
taaacgcgtgcccagccaat

SEQ ID NO: 2604 - DNA, 20 bp, synthetic construct
  misc_feature 1..20: note = B2M gRNA target site sequence
  source 1..20: mol_type = other DNA
aaacgcgtgcccagccaatc

SEQ ID NO: 2605 - DNA, 20 bp, synthetic construct
  misc_feature 1..20: note = B2M gRNA target site sequence
  source 1..20: mol_type = other DNA
cgtgcccagccaatcaggac

SEQ ID NO: 2606 - DNA, 20 bp, synthetic construct
  misc_feature 1..20: note = B2M gRNA target site sequence
  source 1..20: mol_type = other DNA
gtgcccagccaatcaggaca

SEQ ID NO: 2607 - DNA, 20 bp, synthetic construct
  misc_feature 1..20: note = B2M gRNA target site sequence
  source 1..20: mol_type = other DNA
gccaatcaggacaaggcccg

SEQ ID NO: 2608 - DNA, 20 bp, synthetic construct
  misc_feature 1..20: note = B2M gRNA target site sequence
  source 1..20: mol_type = other DNA
ccaatcaggacaaggcccgc

SEQ ID NO: 2609 - DNA, 20 bp, synthetic construct
  misc_feature 1..20: note = B2M gRNA target site sequence
  source 1..20: mol_type = other DNA
caatcaggacaaggcccgca

SEQ ID NO: 2610 - DNA, 20 bp, synthetic construct
  misc_feature 1..20: note = Cpf1 crRNA sequence
  source 1..20: mol_type = other DNA
atataagtggaggcgtcgcg

SEQ ID NO: 2611 - DNA, 20 bp, synthetic construct
  misc_feature 1..20: note = Cpf1 crRNA sequence
  source 1..20: mol_type = other DNA
tggcctggaggctatccagc

SEQ ID NO: 2612 - DNA, 20 bp, synthetic construct
  misc_feature 1..20: note = Cpf1 crRNA sequence
  source 1..20: mol_type = other DNA
atgttatgaaaaaaatcagg

SEQ ID NO: 2613 - DNA, 24 bp, synthetic construct
  misc_feature 1..24: note = Cpf1 primer
  source 1..24: mol_type = other DNA
gagggcctatttcccatgattcct

SEQ ID NO: 2614 - DNA, 66 bp, synthetic construct
  misc_feature 1..66: note = Cpf1 primer
  source 1..66: mol_type = other DNA
cctttattttagctgaagggaaaatctacaagagtagaaattacggtgtttcgtcctttccacaag

SEQ ID NO: 2615 - DNA, 59 bp, synthetic construct
  misc_feature 1..59: note = target sequence
  source 1..59: mol_type = other DNA
tggccttagctgtgctcgcgctactctctctttctggcctggaggctatccagcgtgag

SEQ ID NO: 2616 - DNA, 27 bp, synthetic construct
  misc_feature 1..27: note = target sequence
  source 1..27: mol_type = other DNA
tggccttagctgtgctcgcgctactct

SEQ ID NO: 2617 - DNA, 12 bp, synthetic construct
  misc_feature 1..12: note = target sequence
  source 1..12: mol_type = other DNA
atccagcgtgag

SEQ ID NO: 2618 - DNA, 27 bp, synthetic construct
  misc_feature 1..27: note = target sequence
  source 1..27: mol_type = other DNA
tggccttagctgtgctcgcgctactct

SEQ ID NO: 2619 - DNA, 14 bp, synthetic construct
  misc_feature 1..14: note = target sequence
  source 1..14: mol_type = other DNA
ctatccagcgtgag

SEQ ID NO: 2620 - DNA, 26 bp, synthetic construct
  misc_feature 1..26: note = target sequence
  source 1..26: mol_type = other DNA
tggccttagctgtgctcgcgctactc

SEQ ID NO: 2621 - DNA, 30 bp, synthetic construct
  misc_feature 1..30: note = target sequence
  source 1..30: mol_type = other DNA
ctttctggcctggaggctatccagcgtgag

SEQ ID NO: 2622 - DNA, 27 bp, synthetic construct
  misc_feature 1..27: note = target sequence
  source 1..27: mol_type = other DNA
tggccttagctgtgctcgcgctactct

SEQ ID NO: 2623 - DNA, 24 bp, synthetic construct
  misc_feature 1..24: note = target sequence
  source 1..24: mol_type = other DNA
ggcctggaggctatccagcgtgag

SEQ ID NO: 2624 - DNA, 22 bp, synthetic construct
  source 1..22: mol_type = other DNA
gctactctcttttctggcctgg

SEQ ID NO: 2625 - DNA, 45 bp, synthetic construct
  source 1..45: mol_type = other DNA
tatgctgccgcccagtgggaatcatctttaccagatctcaaaaag

SEQ ID NO: 2626 - DNA, 45 bp, synthetic construct
  source 1..45: mol_type = other DNA
gagttgacacattgtatttccaaagatcatctttaccagatctca

SEQ ID NO: 2627 - DNA, 45 bp, synthetic construct
  source 1..45: mol_type = other DNA
tatgctgccgcccagtgggatcctgggagagacgcaaacacagcc

SEQ ID NO: 2628 - DNA, 45 bp, synthetic construct
  source 1..45: mol_type = other DNA
tggctgtgtttgcgtctctcccaggatcatctttaccagatctca

SEQ ID NO: 2629 - DNA, 45 bp, synthetic construct
  source 1..45: mol_type = other DNA
tatgctgccgcccagtgggacatcatctttaccagatctcaaaaa

SEQ ID NO: 2630 - DNA, 45 bp, synthetic construct
  source 1..45: mol_type = other DNA
tatgctgccgcccagtgggatttggaaatacaatgtgtcaactct

SEQ ID NO: 2631 - DNA, 45 bp, synthetic construct
  source 1..45: mol_type = other DNA
tatgctgccgcccagtgggatcatctttaccagatctcaaaaaga

SEQ ID NO: 2632 - DNA, 45 bp, synthetic construct
  source 1..45: mol_type = other DNA
gctgtgtttgcgtctctcccaggaaatcatctttaccagatctca

SEQ ID NO: 2633 - DNA, 45 bp, synthetic construct
  source 1..45: mol_type = other DNA
tatgctgccgcccagtgggaactttggaaatacaatgtgtcaact

SEQ ID NO: 2634 - DNA, 45 bp, synthetic construct
  source 1..45: mol_type = other DNA
tatgctgccgcccagtgggatggaaatacaatgtgtcaactcttg

SEQ ID NO: 2635 - DNA, 45 bp, synthetic construct
  source 1..45: mol_type = other DNA
gtggctgtgtttgcgtctctcccagatcatctttaccagatctca

SEQ ID NO: 2636 - DNA, 45 bp, synthetic construct
  source 1..45: mol_type = other DNA
tatgctgccgcccagtgggatcctttggaaatacaatgtgtcaac

SEQ ID NO: 2637 - DNA, 45 bp, synthetic construct
  source 1..45: mol_type = other DNA
tatgctgccgcccagtgggaatctttaccagatctcaaaaagaag

SEQ ID NO: 2638 - DNA, 45 bp, synthetic construct
  source 1..45: mol_type = other DNA
tggtggctgtgtttgcgtctctcccatcatctttaccagatctca

SEQ ID NO: 2639 - DNA, 45 bp, synthetic construct
  source 1..45: mol_type = other DNA
tatgctgccgcccagtgggaaatcatctttaccagatctcaaaaa

SEQ ID NO: 2640 - DNA, 45 bp, synthetic construct
  source 1..45: mol_type = other DNA
tcactatgctgccgcccagtgggaaatcatctttaccagatctca

SEQ ID NO: 2641 - DNA, 45 bp, synthetic construct
  source 1..45: mol_type = other DNA
tatgctgccgcccagtgggaaatgtgtcaactcttgacagggctc

SEQ ID NO: 2642 - DNA, 45 bp, synthetic construct
  source 1..45: mol_type = other DNA
tatgctgccgcccagtgggattggaaatacaatgtgtcaactctt

SEQ ID NO: 2643 - DNA, 45 bp, synthetic construct
  source 1..45: mol_type = other DNA
gagttacatgatcccccatgttgtgatcatctttaccagatctca

SEQ ID NO: 2644 - DNA, 45 bp, synthetic construct
  source 1..45: mol_type = other DNA
gtggtggctgtgtttgcgtctccccatcatctttaccagatctca

SEQ ID NO: 2645 - DNA, 45 bp, synthetic construct
  source 1..45: mol_type = other DNA
tatgctgccgcccagtgggacatctttaccagatctcaaaaagaa

SEQ ID NO: 2646 - DNA, 45 bp, synthetic construct
  source 1..45: mol_type = other DNA
tatgctgccgcccagtgggaaatacaatgtgtcaactcttgacag

SEQ ID NO: 2647 - DNA, 45 bp, synthetic construct
  source 1..45: mol_type = other DNA
tatgctgccgcccagtgggaatacaatgtgtcaactcttgacagg

SEQ ID NO: 2648 - DNA, 45 bp, synthetic construct
  source 1..45: mol_type = other DNA
ggctcactatgctgccgcccgacagggctctattttataggcttc

SEQ ID NO: 2649 - DNA, 45 bp, synthetic construct
  source 1..45: mol_type = other DNA
ggctcactatgctgccgccctgacagggctctattttataggctt

SEQ ID NO: 2650 - DNA, 45 bp, synthetic construct
  source 1..45: mol_type = other DNA
ggctcactatgctgccgcccttgacagggctctattttataggct

SEQ ID NO: 2651 - DNA, 45 bp, synthetic construct
  source 1..45: mol_type = other DNA
aatacaatgtgtcaactctgacagggctctattttataggcttct

SEQ ID NO: 2652 - DNA, 45 bp, synthetic construct
  source 1..45: mol_type = other DNA
ggctcactatgctgccgcccgggactttggaaatacaatgtgtca

SEQ ID NO: 2653 - DNA, 45 bp, synthetic construct
  source 1..45: mol_type = other DNA
ccggcaaacaaaccaccgcgacagggctctattttataggcttct

SEQ ID NO: 2654 - DNA, 45 bp, synthetic construct
  source 1..45: mol_type = other DNA
gaaatacaatgtgtcaactgacagggctctattttataggcttct

SEQ ID NO: 2655 - DNA, 45 bp, synthetic construct
  source 1..45: mol_type = other DNA
tcactatacaatgtgtcaagacagggctctattttataggcttct

SEQ ID NO: 2656 - DNA, 45 bp, synthetic construct
  source 1..45: mol_type = other DNA
aaatacaatgtgtcaactcgacagggctctattttataggcttct

SEQ ID NO: 2657 - DNA, 45 bp, synthetic construct
  source 1..45: mol_type = other DNA
ggctcactatgctgccgcccaacagggctctattttataggcttc

SEQ ID NO: 2658 - DNA, 45 bp, synthetic construct
  source 1..45: mol_type = other DNA
cccagtgggactttggaaaaacagggctctattttataggcttct

SEQ ID NO: 2659 - DNA, 45 bp, synthetic construct
  source 1..45: mol_type = other DNA
atacaatgtgtcaactcctgacagggctctattttataggcttct

SEQ ID NO: 2660 - DNA, 45 bp, synthetic construct
  source 1..45: mol_type = other DNA
atacaatgtgtcaactctcgacagggctctattttataggcttct

SEQ ID NO: 2661 - DNA, 45 bp, synthetic construct
  source 1..45: mol_type = other DNA
ttctgggctcactatgctgccgccccccaggaatcatctttacca

SEQ ID NO: 2662 - DNA, 45 bp, synthetic construct
  source 1..45: mol_type = other DNA
ggctcactatgctgccgccccccaggaatcatctttaccagatct

SEQ ID NO: 2663 - DNA, 45 bp, synthetic construct
  source 1..45: mol_type = other DNA
ggctcactatgctgccgccctcccaggaatcatctttaccagatc

SEQ ID NO: 2664 - DNA, 45 bp, synthetic construct
  source 1..45: mol_type = other DNA
tctgggctcactatgctgccgccctcccaggaatcatctttacca

SEQ ID NO: 2665 - DNA, 45 bp, synthetic construct
  source 1..45: mol_type = other DNA
ggctcactatgctgccgcccagagacgcaaacacagccaccaccc

SEQ ID NO: 2666 - DNA, 45 bp, synthetic construct
  source 1..45: mol_type = other DNA
cacattgtatttccaaagtcccactcccaggaatcatctttacca

SEQ ID NO: 2667 - DNA, 45 bp, synthetic construct
  source 1..45: mol_type = other DNA
ggctcactatgctgccgcccaatgtgtcaactcttgacagggctc

SEQ ID NO: 2668 - DNA, 51 bp, synthetic construct
  source 1..51: mol_type = other DNA
tggccttagctgtgctcgcgctactctggcctggaggctatccagcgtgag

SEQ ID NO: 2669 - DNA, 45 bp, synthetic construct
  source 1..45: mol_type = other DNA
acattgtatttccaaagtcccacttcccaggaatcatctttacca

SEQ ID NO: 2670 - DNA, 45 bp, synthetic construct
  source 1..45: mol_type = other DNA
ggctcactatgctgccgccctagtgggactttggaaatacaatgt

SEQ ID NO: 2671 - DNA, 45 bp, synthetic construct
  source 1..45: mol_type = other DNA
ggtggtggctgtgtttgcgtctcttcccaggaatcatctttacca

SEQ ID NO: 2672 - DNA, 45 bp, synthetic construct
  source 1..45: mol_type = other DNA
cttctgggctcactatgctgccgcccccaggaatcatctttacca

SEQ ID NO: 2673 - DNA, 45 bp, synthetic construct
  source 1..45: mol_type = other DNA
gctgtttcctgtgtgaaattgttatcccaggaatcatctttacca

SEQ ID NO: 2674 - DNA, 45 bp, synthetic construct
  source 1..45: mol_type = other DNA
cccttctgggctcactatgctgccgcccaggaatcatctttacca

SEQ ID NO: 2675 - DNA, 45 bp, synthetic construct
  source 1..45: mol_type = other DNA
ggctcactatgctgccgcccaggaatcatctttaccagatctcaa

SEQ ID NO: 2676 - DNA, 45 bp, synthetic construct
  source 1..45: mol_type = other DNA
ggctcactatgctgccgcccccaggaatcatctttaccagatctc

SEQ ID NO: 2677 - DNA, 45 bp, synthetic construct
  source 1..45: mol_type = other DNA
ggctcactatgctgccgcccttactgtcgtccatgctgtgtttgc

SEQ ID NO: 2678 - DNA, 45 bp, synthetic construct
  source 1..45: mol_type = other DNA
ttctgggctcactatgctgccgcctcccaggaatcatctttacca

SEQ ID NO: 2679 - DNA, 45 bp, synthetic construct
  source 1..45: mol_type = other DNA
ggctcactatgctgccgcccttaccagatctcaaaaagaaggtct

SEQ ID NO: 2680 - DNA, 45 bp, synthetic construct
  source 1..45: mol_type = other DNA
ggctcactatgctgccgccctgtataccgtcgacctctagctaga

SEQ ID NO: 2681 - DNA, 45 bp, synthetic construct
  source 1..45: mol_type = other DNA
ggctcactatgctgccgccccagtgggactttggaaatacaatgt

SEQ ID NO: 2682 - DNA, 45 bp, synthetic construct
  source 1..45: mol_type = other DNA
ggctcactatgctgccgccctgggactttggaaatacaatgtgtc

SEQ ID NO: 2683 - DNA, 45 bp, synthetic construct
  source 1..45: mol_type = other DNA
ggctcactatgctgccgcccaatacaatgtgtcaactcttgacag

SEQ ID NO: 2684 - DNA, 45 bp, synthetic construct
  source 1..45: mol_type = other DNA
ggctcactatgctgccgccctctcccaggaatcatctttaccaga

SEQ ID NO: 2685 - DNA, 45 bp, synthetic construct
  source 1..45: mol_type = other DNA
tgggctcactatgctgccgccctctcccaggaatcatctttacca

SEQ ID NO: 2686 - DNA, 45 bp, synthetic construct
  source 1..45: mol_type = other DNA
tactgtccccttctgggctcactatcccaggaatcatctttacca

SEQ ID NO: 2687 - DNA, 45 bp, synthetic construct
  source 1..45: mol_type = other DNA
tgggtggtggctgtgtttgcgtcttcccaggaatcatctttacca

SEQ ID NO: 2688 - DNA, 45 bp, synthetic construct
  source 1..45: mol_type = other DNA
acttgggtggtggctgtgtttgcgtcccaggaatcatctttacca

SEQ ID NO: 2689 - DNA, 45 bp, synthetic construct
  source 1..45: mol_type = other DNA
ggctcactatgctgccgcccaagtgggactttggaaatacaatgt

SEQ ID NO: 2690 - DNA, 45 bp, synthetic construct
  source 1..45: mol_type = other DNA
ggctcactatgctgccgcccgtgggactttggaaatacaatgtgt

SEQ ID NO: 2691 - DNA, 45 bp, synthetic construct
  source 1..45: mol_type = other DNA
ggctcactatgctgccgccctcttcatcatcctcctgacaatcga

SEQ ID NO: 2692 - DNA, 45 bp, synthetic construct
  source 1..45: mol_type = other DNA
ggctcactatgctgccgcccttataggcttcttctctggaatctt

SEQ ID NO: 2693 - DNA, 45 bp, synthetic construct
  source 1..45: mol_type = other DNA
ttcttcgatcagtctaaaaatggctcccaggaatcatctttacca

SEQ ID NO: 2694 - DNA, 45 bp, synthetic construct
  source 1..45: mol_type = other DNA
ggctcactatgctgccgccccatctttaccagatctcaaaaagaa

SEQ ID NO: 2695 - DNA, 45 bp, synthetic construct
  source 1..45: mol_type = other DNA
ggctcactatgctgccgcccaataggcttcttctctggaatcttc

SEQ ID NO: 2696 - DNA, 45 bp, synthetic construct
  source 1..45: mol_type = other DNA
ggctcactatgctgccgccctttggggtggtgacaagtgtgatca

SEQ ID NO: 2697 - DNA, 45 bp, synthetic construct
  source 1..45: mol_type = other DNA
ggctcactatgctgccgcccttaaaagccaggacggtcacctttg

SEQ ID NO: 2698 - DNA, 45 bp, synthetic construct
  source 1..45: mol_type = other DNA
ggctcactatgctgccgccctgtttgcgtctctcccaggaatcat

SEQ ID NO: 2699 - DNA, 45 bp, synthetic construct
  source 1..45: mol_type = other DNA
agtgtgatcacttgggtggtggctgcccaggaatcatctttacca

SEQ ID NO: 2700 - DNA, 45 bp, synthetic construct
  source 1..45: mol_type = other DNA
ggctcactatgctgccgccctctggaatcttcttcatcatcctcc

SEQ ID NO: 2701 - DNA, 45 bp, synthetic construct
  source 1..45: mol_type = other DNA
ggctcactatgctgccgccctttggaaatacaatgtgtcaactct

SEQ ID NO: 2702 - DNA, 45 bp, synthetic construct
  source 1..45: mol_type = other DNA
ggctcactatgctgccgccccccaagaatcatctttaccagatct

SEQ ID NO: 2703 - DNA, 45 bp, synthetic construct
  source 1..45: mol_type = other DNA
ccttctgggctcactatgctgccgccccaggaatcatctttacca

SEQ ID NO: 2704 - DNA, 45 bp, synthetic construct
  source 1..45: mol_type = other DNA
tgggtggtggctgtgtttgcgtctccccaggaatcatctttacca

SEQ ID NO: 2705 - DNA, 45 bp, synthetic construct
  source 1..45: mol_type = other DNA
ggctcactatgctgccgcccacaatgtgtcaactcttgacagggc

SEQ ID NO: 2706 - DNA, 45 bp, synthetic construct
  source 1..45: mol_type = other DNA
ggctcactatgctgccgcccgtgggactttggaaattcaatgtgt

SEQ ID NO: 2707 - DNA, 45 bp, synthetic construct
  source 1..45: mol_type = other DNA
ggctcactatgctgccgcccgcccaggaatcatctttaccagatc

SEQ ID NO: 2708 - DNA, 45 bp, synthetic construct
  source 1..45: mol_type = other DNA
ggctcactatgctgccgcccggctgtgtttgcgtctctccaggaa

SEQ ID NO: 2709 - DNA, 45 bp, synthetic construct
  source 1..45: mol_type = other DNA
tcttactgtccccttctgcgtctctcccaggaatcatctttacca

SEQ ID NO: 2710 - DNA, 45 bp, synthetic construct
  source 1..45: mol_type = other DNA
ggtggtggctgtgtttgcgtctctccccaggaatcatctttacca

SEQ ID NO: 2711 - DNA, 39 bp, synthetic construct
  source 1..39: mol_type = other DNA
tggccttagctgtgctcgcgctactctatccagcgtgag

SEQ ID NO: 2712 - DNA, 41 bp, synthetic construct
  source 1..41: mol_type = other DNA
tggccttagctgtgctcgcgctactctctatccagcgtgag

SEQ ID NO: 2713 - DNA, 56 bp, synthetic construct
  source 1..56: mol_type = other DNA
tggccttagctgtgctcgcgctactcctttctggcctggaggctatccagcgtgag

SEQ ID NO: 2714 - RNA, 10 nt, synthetic construct
  source 1..10: mol_type = other RNA
  variation 1: note = A nucleotide can be repeated up to four hundred ninety times
aaaaaaaaaa

SEQ ID NO: 2715 - RNA, 13 nt, synthetic construct
  source 1..13: mol_type = other RNA
gccgccrccatgg
